United States Patent Application Publication US 2022/0211063 A1 - sequence listing, part 46

SEQ ID NO: 151 - DNA, 8605834 bp, Penicillium roqueforti (residues 5,163,502-6,884,668 of 8,605,834)
  misc_feature (89143)..(89590): n is a, c, g, or t
  misc_feature (91422)..(91652): n is a, c, g, or t
  misc_feature (329880)..(330016): n is a, c, g, or t
  misc_feature (430767)..(431098): n is a, c, g, or t
  misc_feature (461650)..(461666): n is a, c, g, or t
  misc_feature (496409)..(496588): n is a, c, g, or t
  misc_feature (532012)..(532106): n is a, c, g, or t
  misc_feature (539762)..(539897): n is a, c, g, or t
  misc_feature (569546)..(569750): n is a, c, g, or t
  misc_feature (649063)..(649199): n is a, c, g, or t
  misc_feature (691124)..(691186): n is a, c, g, or t
  misc_feature (866509)..(866673): n is a, c, g, or t
  misc_feature (1032465)..(1091864): n is a, c, g, or t
  misc_feature (1092551)..(1092762): n is a, c, g, or t
  misc_feature (1210222)..(1210434): n is a, c, g, or t
  misc_feature (1240580)..(1246852): n is a, c, g, or t
  misc_feature (1247779)..(1253711): n is a, c, g, or t
  misc_feature (1258330)..(1372329): n is a, c, g, or t
  misc_feature (1374163)..(1374571): n is a, c, g, or t
  misc_feature (1457570)..(1457856): n is a, c, g, or t
  misc_feature (1505383)..(1505555): n is a, c, g, or t
  misc_feature (1513254)..(1513416): n is a, c, g, or t
  misc_feature (1624076)..(1624277): n is a, c, g, or t
  misc_feature (1669186)..(1669391): n is a, c, g, or t
  misc_feature (1761254)..(1761480): n is a, c, g, or t
  misc_feature (1817801)..(1926100): n is a, c, g, or t
  misc_feature (1933201)..(1933451): n is a, c, g, or t
  misc_feature (1964013)..(1964390): n is a, c, g, or t
  misc_feature (2150548)..(2150646): n is a, c, g, or t
  misc_feature (2196778)..(2196986): n is a, c, g, or t
  misc_feature (2250772)..(2250828): n is a, c, g, or t
  misc_feature (2391584)..(2391875): n is a, c, g, or t
  misc_feature (2493614)..(2493845): n is a, c, g, or t
  misc_feature (2532220)..(2532497): n is a, c, g, or t
  misc_feature (2536366)..(2536607): n is a, c, g, or t
  misc_feature (2786762)..(2787018): n is a, c, g, or t
  misc_feature (2859720)..(2860011): n is a, c, g, or t
  misc_feature (2874131)..(2875235): n is a, c, g, or t
  misc_feature (2881752)..(2882057): n is a, c, g, or t
  misc_feature (2897306)..(2897484): n is a, c, g, or t
  misc_feature (3050874)..(3051598): n is a, c, g, or t
  misc_feature (3057389)..(3057640): n is a, c, g, or t
  misc_feature (3069739)..(3070114): n is a, c, g, or t
  misc_feature (3075970)..(3076344): n is a, c, g, or t
  misc_feature (3305361)..(3305458): n is a, c, g, or t
  misc_feature (3318647)..(3318971): n is a, c, g, or t
  misc_feature (3502937)..(3503051): n is a, c, g, or t
  misc_feature (3538222)..(3538805): n is a, c, g, or t
  misc_feature (3783649)..(3783863): n is a, c, g, or t
  misc_feature (3992502)..(3992620): n is a, c, g, or t
  misc_feature (4005402)..(4005665): n is a, c, g, or t
  misc_feature (4027592)..(4027792): n is a, c, g, or t
  misc_feature (4058717)..(4058863): n is a, c, g, or t
  misc_feature (4267467)..(4267504): n is a, c, g, or t
  misc_feature (4352970)..(4353432): n is a, c, g, or t
  misc_feature (4361969)..(4362121): n is a, c, g, or t
  misc_feature (4393887)..(4394120): n is a, c, g, or t
  misc_feature (4451619)..(4451756): n is a, c, g, or t
  misc_feature (4461648)..(4461894): n is a, c, g, or t
  misc_feature (4481354)..(4481472): n is a, c, g, or t
  misc_feature (4534019)..(4534156): n is a, c, g, or t
  misc_feature (4590279)..(4590507): n is a, c, g, or t
  misc_feature (4669101)..(4669433): n is a, c, g, or t
  misc_feature (4737275)..(4737369): n is a, c, g, or t
  misc_feature (4766897)..(4767094): n is a, c, g, or t
  misc_feature (4834677)..(4834984): n is a, c, g, or t
  misc_feature (4927667)..(4928240): n is a, c, g, or t
  misc_feature (4945248)..(4945398): n is a, c, g, or t
  misc_feature (5082668)..(5082816): n is a, c, g, or t
  misc_feature (5112709)..(5113430): n is a, c, g, or t
  misc_feature (5314787)..(5314980): n is a, c, g, or t
  misc_feature (5372720)..(5373147): n is a, c, g, or t
  misc_feature (5459101)..(5459212): n is a, c, g, or t
  misc_feature (5480412)..(5480585): n is a, c, g, or t
  misc_feature (5535554)..(5535568): n is a, c, g, or t
  misc_feature (5567702)..(5567841): n is a, c, g, or t
  misc_feature (5598930)..(5599143): n is a, c, g, or t
  misc_feature (5726966)..(5727044): n is a, c, g, or t
  misc_feature (5743477)..(5743945): n is a, c, g, or t
  misc_feature (5807639)..(5807725): n is a, c, g, or t
  misc_feature (5919971)..(5920649): n is a, c, g, or t
  misc_feature (5921963)..(5922269): n is a, c, g, or t
  misc_feature (5942845)..(5943124): n is a, c, g, or t
  misc_feature (6011310)..(6011605): n is a, c, g, or t
  misc_feature (6325131)..(6325449): n is a, c, g, or t
  misc_feature (6397541)..(6397652): n is a, c, g, or t
  misc_feature (6604798)..(6604968): n is a, c, g, or t
  misc_feature (6843737)..(6849488): n is a, c, g, or t
  misc_feature (6859843)..(6860483): n is a, c, g, or t
  misc_feature (6915200)..(6915987): n is a, c, g, or t
  misc_feature (6919291)..(6924161): n is a, c, g, or t
  misc_feature (6950610)..(6950746): n is a, c, g, or t
  misc_feature (7010146)..(7010383): n is a, c, g, or t
  misc_feature (7088736)..(7088959): n is a, c, g, or t
  misc_feature (7281029)..(7281208): n is a, c, g, or t
  misc_feature (7435388)..(7435513): n is a, c, g, or t
  misc_feature (7580067)..(7580387): n is a, c, g, or t
  misc_feature (7598064)..(7598213): n is a, c, g, or t
  misc_feature (7639278)..(7639394): n is a, c, g, or t
  misc_feature (7648488)..(7648695): n is a, c, g, or t
  misc_feature (8007457)..(8007643): n is a, c, g, or t
  misc_feature (8053200)..(8053665): n is a, c, g, or t
  misc_feature (8129339)..(8129754): n is a, c, g, or t
  misc_feature (8134049)..(8134237): n is a, c, g, or t
  misc_feature (8188324)..(8188473): n is a, c, g, or t
  misc_feature (8240007)..(8240478): n is a, c, g, or t
  misc_feature (8245915)..(8246026): n is a, c, g, or t
  misc_feature (8305192)..(8305782): n is a, c, g, or t
  misc_feature (8314148)..(8318265): n is a, c, g, or t
  misc_feature (8345463)..(8345564): n is a, c, g, or t
  misc_feature (8407840)..(8408046): n is a, c, g, or t
  misc_feature (8424732)..(8424857): n is a, c, g, or t
  misc_feature (8481626)..(8481849): n is a, c, g, or t
  misc_feature (8597147)..(8597393): n is a, c, g, or t
tagcctttgcatttgccagtctcataaaacagaaaacaattagaatacagcaagtaaactcccgttcctcagattcggggttcatgtatgtgaaatgtccaagagactcggtagtcgagcatgacaacaaagcaatgcatgcaacaaaagagataaatgcaatatatgattgagggagaggtgatgagaaactccatggcctagaaactgaacaatccgcttcgcttcttgcctagcggataaaccaccaaagcggctaggaagagaccaactgtcgttccaatagcaacttgaaccatgccatatccgatatcgaaaacaaccccgtagctttggcttctcgcctcgtcggctgatagcttctttgccgcgtcgacaaatccttgtgtcccattgttcacaaccgcatatggagaccgggtcatttcctcagcagaagtaataccagatatcagagacccactagcggcaagaccggagggaacgaggacaaagattgccggcagcattgccgcagcggcgagcccatgctgtaagcggctgtagaaattgcccatcacaccaatgacaaaggcgcccagggcattggatacctgggtgttggaatagaagcgcttggcgctgaagtagttggtcacgtagccagccagggagatcactatcataatcggcatttgcttccacttggcgcggttgacgatcgccaggcacacagtgaataggatgacgaacggaaaccgttgcaggtactcgttgtggatggggctggcgggacatgtatacgccgttgaagcttgagagtcgaggagcccgtaaacggcagtgccgatggtaattccaaatccgaggaacagcgagtatatgatagcatagaccatgcgaacagaacctgcaacgatactgcgtgactggagctccagactagcacataatacagtgtatcctggcaggatgagggcgatggccgactgtgcgagggcagaaaagcagaacagaggttccccattgaacctgatgcttccaaaggcacgggcaaggaaagacgtcaggactgcggcggagatctcaaacacgttcgaatataggctcgatttggttgacaggatcaattgtaacacgccgaggagacatcccagtagaaacgccacggggatatccaccggtcgggcgttgaaggcaaagggcccgactgatgcgctagcacagccgtgggcgaagatgaggaacataatgtggaatttgctctgcttcttcatgacctcatcgagccgctgtattgcctcttcaaccccaataacatcgtgaatcacttccttataaatctcatgcacatcagccagcttacccaggtcaatgccttgactggatcggacgactttgacctctgttgtgtgtgtggaggcgtcgtcaaaggagatgatcatgcagccgggtatgtacaaaaactggccatctatttggatgacgcgagctgtcatgcgcatatattcctccaatcgatgagttggagctccatacttcatcaaagcgcgacaaagctggatcaagtaccgttgtcgagacagaagctcggcaatatgaacagtgatatgaatttcatcctcaagctgagccttgggacgtgagcggcttaggtttggaacggccgcaccactgctgcgggaccgcgtgagcatggcaaagggggagccagagcggcgggaggagccggccatggaaatgctagaacgagcggttgatttatcgtaccacttcctttgcggtttccaaacggagtctggagacaggccacgtccactgaactcggaagagctcccctgtcgagaccgcccataccgtcctcgaccttggttgtggttataacgaggcttctcgtagagcttgagcagcgatgagagaattcctccgtgataacttgtcgtccgttcagcagactcgtatgagttcctgtcctcgctgacggtgtcttggtcactggagtgcaacccgggagactgagggcgaaggcgagtcagaaagttcaggtctcgaggtgacatttgatgcactagataatgtgctccggagttgcacggtgttgatcgcccgtctaagaattccgcttcatgttcatctattaggttgtcgaagagttgttgtttctcggggaagcttatcacaggaaatttatcttcatctgcagtctggcacaccacttcggtgggggtggatccaatctcagacactagactgcactgggggctttgcttcggacaattatgcgggcaattgagaagggatgtgagcctgtgggccctttcatgtgcaaagcagatggcccgccccttgtcgttcgtaccctgaccaagctcatactctgctgaagttcctggtgagctagtcctggtgctgatcgtcaaaccggtaacacccgctgacgcgctaaaatgatcgtcttccacctgtggtgccagtggggagcttgaggatactttctcctgaaagcccggaatgttggcagtgggtaatggtctttgcggcagctcggtgcccctttgatccagtcggaattcgaccataggcccagtgggttgttctctcaaatcggattcgctgtccgtaagcttgacgcgatttgtgtttttcagaatgccggcattccgatacttgtcctgtgcgctagcgtcactgaagctccgcacctgagacactggctggccttggaagctatcaatgagcagtgatgatgtaaaggaacgcgaccttgatagactggacgatccttcctcagaggcgctgcgggagatcggaaggtcaaaataacctcccgccattatggtgtaatccttcctcttagattggcatctacttcttggttactcagtagagctcacagaccccctgggttaccgacctcttagataaaagcacgggtatggcggttcatgtgcccaggtgatcaactgtaacccagcaacagtcagctatgtgatataacatggggagagctcttctttccgggaatttgtgagcttcgacaaccacggagagtgagctcacctcattcaaggcaaaagcataaaaaaaaagaggaagagatactgatgccaacgcgaaaaagaactggcacgaactaccacgccgggtctagagctccttgggaaggggggttgagatcggagatcctaccaggaattccaactatgtcatgtgtacataattagacgtagaatattgtgtcggaaaataaggacatctgcaacctcggaggaaggggcaggaggaaagaaatcaggcaaggcaaaatcaatataaaagagacagtagacgcgaagtttgggatgcaggagttcctctatttacgaggatgctctcggttaaaggcaagactaaaacaaaaagagaaaaaagacttttccagcttgctgggcagcacacgggccatatcaagaagatccagaggcccaatgagactgcattgaaggggatttattttgggacatgatgaccccgtgtagccgtgaggcgccatccccatgccaggttctcacaggttttgccattttgccacgatggtcaatcagctggaaagttccaggagtagagaacaagccgaggtatggaactgacagctagaattgtgaatagaaacggtacattgccccttagcgggtattgcgggagattggcacattagttgcgcgagacccggttctctgacctgaaaaggattggatttgcagcacagccgacgttccggatcgtatatcgttgaacctcgccgaacctcgaccgttagacctagcagaagatctcccaaaggggatagagataaggggaccgagctccttgtcaaagagactaggggtttcacaagtccatgaggtcccacaaaatctgtagagtcaaaagagaatctgatggacgcgtcaggtcaaaggggtgtgtgtgtgggtatcgagagattggctgaagagggatcttcaggatcagaggttgaagaagatcagtggagcaactctcttttttttagcgttgatctaccttttcatgttgactaagaagcaatatctggtcttatctccccttctatttctacttgcgtccacattgacgtatgaaatgcgattacgaaccagtccaaaccatcccttgtgtgtctttgacatcatgggaaatcatccgacaggcgaaacatctctgtcatgcaagatacctgcaagatacctgctttcactagtttctgattgattcgaccagtcgagaactacatacgtaggattccaacactattttattatccacctacatactataattccacatcaatatgggtctgaagatccctatcacaccatcgggaagaatctcatcggtattgatggccatctctctactttccgaccgagatcttaccgagaagcaaatgagtactcataccgcaggttgacacccggaagacctccgggacccgactcggtgttgattctcagaggggatgttgaaggtttttgatctgtcccggcaatgtacagggtaccacgatgaaaggttgcactaatatccggggaaactgtttactctctctgcttgttccagtgctgtaaccaattctactgcccataggaaagcccgacaagcacacatgcactcctcagcgggctcgaaacgcccccttcatgttcaaccaatatcccacagatgagctcctcgctcgtcattgtgccacttcaagatgtgagatgcttatctaggcaatgatcattacccaacctatgctgcctaaaaccctacttcaagggagctggggtgatttaagcttacaggtgtggctgctgactagttctggatattgtactagtcatggttatcagtcagggggggacagccagggcccaaattatttctcgagtggcaacgaacggtacattcaattgggtactgtgcaaggtgactcttgaatctctgagatggtatcagatagggccaggattgtctctttcgaggcgctcgttatcaaacgttagtattgaacattctgatggagttttcgtgcgctattacattgggccattcgtggcttggggaggggctttctcccatttgtttctcttcttggactagatcaatatcttacgctatcacaactgtagaggcttgattgaatatgtcttgcttcacctctatctcattattttatgcaacaatgcgaccgcacaaccatccgtgtcaccctcaccctccctgtccgtcacactgtcttcttccccaccagctgtaccgaagaatataatggtgtgaccttcaagaaagtagggaccaatactcaagcttggacggcagtactatactgtttatgtgaaacacatgtgccacggagttccggctgctctaccctcgggtagacacagataaagctgctttaatcccaggattcttacgtggcctgggagtaagtaaatatatcgtcttctacaattatgcattgtggcattacactttagagaacgaagatcccgttcacattcctaaagttaagctctcgactactatatataggttttgtcaatggtaaatgtcttgcattgcgtatgtttcaacttcctttctttcatgatggttccaggattgttgccattgtttagttgacttgtagacacgtagaaataatgtcaacttagagtttgtgtcaaggttttttgggccgtattcgtaccatggttcttgatataacgaccgcataactatttaggtgaatgcatagtgattcgtatgttccaatctcaactcttagaatatcaaggtttggacgccggcatgacaaccagccaagtatatcaaactaggtgccatctgcacccacgcggaatacggtttattgggcttcactctgcagcccaacggattatttccctattcaccgtgcagacggaaattaagctacgtatatgatgagaagccaagagccactaaacacttaataacatttatcacatcgtttactgtcactgaagtcctcatttgggccaactcatcactttcctcactgacagcggccgttcgagatctgagttcatctcagtggatgtataacaatcagttctcatttcgccttttgacaaaagcgtaagctggaaccgaaatagttatgcagctaccccaagctcgggaccaccctccataagcatcagcatacaacccggctctgtaaccatgacactcagcgtgaggtacattacatggtgcatcaagacgacagacctttcaatgtggtctagtgagattgatactgccccaagccatggtgacctctagtagccattctttagagtatcttgtaaccctttgaccctaccctggcttatgcctttcttactttcaaacatcaagcttaatgatagaaaacgtctttcctacagcaatacctacccaggactcttcaacagaccgagtaaccaagtgctccacgtgggtcattgcaggacaacaccaggattatcataggatctaagaaaaatatttgcgtattccgaataagccgttgaattgttcaaccaaaaaaactacttagatactagatacgttcatggagcatgatcaacatagccaaaacaaaaaataagatcagatatttgctaagatatgtattcaccagggtgatctgagctcaaagtgcactgggaagagctgtctgtacataaccagatgtacatcagaagccaaattgagaagtgaagggaagacaacttgccatcgcaagttcctcttcctgtctcaagctcatcctgtcatttccaagtaaatagatccggtccgcccagcctcagttatgatgcaaggtgacaaagataaagcatagtggagaaatatgaagagaagccaaaagaaaaaaaataggaataaagtcatctcagaccgataaaggtctttcgtcacaaaaaaacatgaaccctggcatgagttgccagcaatagagtggtaacgagaaaaagaatgggggagggtcagccgctgtcgagtccttttaatcaggactcgctgggcaaagaaagacgaaagctgacccgtttggcgagagaaaaacataaaggaaggtcatacgtcgctgtcacgtgtggttcggcattacatgatgggtgtcttgcgtttttcagcgctggacaacaccagcatcggcgtcttgcgccgttctggtgcctgggctaccggcccctggccagcaacgacatctgccactgagggcgacgaggtaccactggcactaggtgagtgggcataatccccgcgagcatcaacaagctttgagtaaaagtagcctccgtcttcgctagtcggcgtggcgctgtggaaggggctgtccggggatttgcgatcccgaccagatttttcccttctctcggatccaatggcaccattagcaactgctcgcaggctgcctagactgggcttgctggagagacttcctccgctacgcacggtggcatcatcgccatccgaaaaagtaaactctttctcactcgcaggggtgttcgtgcctccgctgctgtggtatccaaaactgcgtgtgtcgccacgacgctcgattcctgcgcgaacaagattgtgaacggcacgacgccgctggcgagtcgcgaagttcttgctaccttcgtgcttggaggtgggcttggccacgagatcctcaagcgaaggggggccacggggctgacgcatcggatgctcaccagcacgactttgaccgggtccaaatgttccagtggccggtgtcggcggcagggcagcagacctagggccgggtcccacattggccttgacagtatcaatgttcgtcttgatacttgggttgaacgaaaggttcttgcggtggcctcggcgcagagcattcacagacgagtcgtggggcggagaggggctgctaactggaggggaaattggctgcgggaattgcatggtagagtacgtggagtccgcaggaggagaaatttctgcgcggaactggggaacttgctggccaatatgggaccgagtatcttgataaaactgttgctggcgatcttcctgggagttatccatgatatagctttgttggccagtcagaggattgtagacgcagaacattccaggttgaccagggaccggctgcacaatgggctgaacaccttgctggagctgctgttgataaaatcccatgccagggatggagagtgaaggagcatgttgctgccgaggaagggacatcccaaggttgaggccttggaattgctgagctgcagcagtgacactgatcaactgctgttgcaggcgttgctgctgcgccgcaaggaacaggttggttgacatcaactctgcgtacatgttctcatcgattggaatatcaccacccgccatttcaagcgtcggaggtgcaagaacctgctccggcatagtgtacatcatgcggttgtgatgcgagttgttgcggtacgagttcgcgttttgattttgggtgtaattgtgctgtgggaatccagttccggtcgcagtttgtgggacccggtcggatcctcggttggaataaccagtgaatcgtgcaccttccattccactccgctgttgatgctcagaggggatcgtcgcagacttgggagcagtgcgcagtccagccaaaagatgagagcggctggtacgcggagtggagacggatgctgatgcctgggactcatcgatggtcgaaacctggggaggcatgctcaagcgcttgatgtgagagcccttgccgcgcgaggcgaagccagagcccggcacgcccagggaattgccattattgaaggacgaattgtaagacatttgagcaagaccgccagcgtccatactcatattcgttcggtagaggtgaatttaggtatgtgcaatagaatgcaagcgagacaagcggtatcttttgacgttcggattcgacgtgagcgtttggggtcaaccacaaagctgagctcacttctcggcgattaaggaattatggtgtctatgcgagaacaagtgctgaaataagtctgcaatatcgagattcaacgaccggaaaatgaaacgtggacgcgagagtcgggttttctgtatccggaaactggtcagtgagatccaacggatggggcacaaggcaatcacacgtaccaatcacaggtgaagaaaataaagcgagcgagtggctagcgataaagacgatagatgagagaagaaccgagctgtacaaggacttgctgggtttgaaagttgcgaacccaaggaataggtctcgaggaagccgaggagtttgagatatgttgacagacacctcgaaagaaaaaagaagaaaaaattaagagggtatttttaggaagagaagccacgcacgaagctagaccacgaagaaaagataaaatgtccgggggaaatgctctgcaaatcctagccgaataagaaaagagagtagttcacgcgatgccgaagatcgaagacttgtaggctgaaacactcaaggtggcgaccaaacaacccagtgctgtgcgaataaccgaggtgaaaacaggttcaaggatccgaagagatggatttgtgaagacaatcaaaaatgtagtgaattcggtccttggccaaacacaacgtttttcctcaggggggcggaactgatcgggactatttgcaaagtggatagatgctttttttgggtgttttccatgaaatgagaagagctgcagagaaagaaggaatgcagaggggaagggaaaggaaaagaaagaatcgaagattagatggagggttggatgtaagagaagaagaagaagtgagcgattaaagatggtggatggccgcggggattgtcgcctaatccctcaggcagcaaccgagcacaatagtccaaaagcgtactagcgtcttttctcaggcacgagaggcaatatcaacggaatatcaacggaggttcactttgatatcttcttttcatcatgtttggaaacattggggtaattcaagctttttcagctttacccttactctaggcaatatcctattctctaccgaatgcctgatcatagctgacagcattatcatagaagacccattgaggagatctgactggctcattctattgaccaataagcaacacacccaggcctgaagcgatcccatcacatccccagccaaatcattggctgttatccactagcggcgcgacgtggctgccatccaatctacgcctgacgatgcccctggagccgctcgtcgcaaatgccaagctgtcggcgccaaccaatgggtttacctgaacttgtttgcttctagctcataattcagtcggatctcgttatggtcaggaaatcaggagtgtagtattttgccacgaactgcaagtgatcttaggcggctttgatttctagaaggcaacaaaaaccaggaaaaaccaagaaaggtatcgggcttgcagaacattgtctgctatttcgatacagggtagaatctaagtagactacaattctcatcacattcatggttggatgctttctcatgatacattgcacataatcaccaaatgatgcgatgtatattattgtagaaaagatcacattctcctgaatcatgaaaccagcaggacttgtcgcttgttgctaccccaacgacaagccgacgtcttcttcagcaggaagttccggaaattaaaaattggcttcatggctgcccagacgggcgtgcaagtccagcaacaaataatatggacgtgcaccatttattttggggccatatatagaacaaggtaataagagactgcatagactagggaactgttaagtgagatcgtgacataggagttagcgtgattatcatctacaacggccatgaagatacggattgtcaattggataattcatgtaaacgcaggtgtaaaccacgcattttgtcgccctaaatgaaccatacatggataagatacgtctcagcccctcctggcttcgtatttcgcatctcgcccgttccggagccgctgtctcccacgttgtatgtacaatgtacaagcactttgatggtctgtacagacacacgaaaagagttagactgcctgtgcgtgcattgtcagaatgccagtcaaatggcgaatggacccagaaccacaactagatgagttgttaatgagccatgagaacatgaagaaaagataaaccaatggatacgaagaagaaagagaagatgcggggtatctgctggctgggtagtgtgccagagggagaaaatcaatgagtcatgaaatataatcaaacataaaagttcacgcgtgcaacctcgcggtagttaagcatccaccgagacaccgggtccatggtgagtggccgactcattctgggatggtaatcgtcgatgacctagctccggagtagtgcccttgccgttcattcggtcaaattccaacgtctcggccaactccgcagccatagggtctagatcttcttctttaagtccggtcgccaaagccaccagcttacggtgcatatcgaacttggtgctcacacccgcatccgctgtttgttgggctagatccttaatagcattgcggcgtatcttctgcgcagagcaaagctcttgagcgagtcgataccgagccattaattcaccttgctcaagggactctgacgtaggtttaggtacctccgcaatagcaaactgttcagccaaccgagcatgctggatttgctcaagaagggactcatagcttgcccgcaatttttcatatcggccagcttggtcgtcattgcgctcatgatcggcctccttggctgccaatgcagatatttgcttctgaatcttctggcggtcggattccaattgctcgtgtaacgcttcgggattggcgacatcattggaatcctgctggttgattttcgagtttccataggtcacggcaagctttttattagcctcggccatgattgttccaatcctggagaggagttcagtggtcgcaggggcatccggaattggggcaacggactgtcggtctgtgcccacaagaccagctggttcaacatccatatgttcattagccatggtgacggaggatggggccggcgggatgtcatggtcgtgatgttgagaacgctgtacgatactgctagcggtttcccccttattattcaccagatcgccagcgcgatgacaatgcacaagaaggatattcaccagacggaacgcgccgttgcgagcagcgaccaagacagcggtgtctccattctgatcttgacatgacaacaacatttgtacttcatcttgcgagcatgttttgcataacttatcgaggagtatttcgcagtaataacgtgagctcttccatttccccttgcttcgagtattctctgcaatgtgatggaagatagtggcaccgaaccaatctcggaaagagacagtatccagaagcatgtctaagagattcgaaaacgttctcttttcgtaattattggtaaacagaacagctcggacgagtggggtctcttcatgatccgaaagtgccttgacattggcccctctgtgcaaaagatcttgcacaatgcccaagtcacccatcgcacatgcccagtggagtgctgtgttcccagaatcatcaatagctcgatcgacctggaaatgggcagggggttcgggagggggaatgcgtgttgcctctggtgcatcacccacggtcatgaaatagtctaaaagttggtcgccgtagattatgtgttcttgctcgctgatggacataggggtcgcctcctccactccacgcttccgcttccgtccgccatgtgacatttgaagcatatcctcgtctgcgaccattgatgatgattcaattgtagcgtgcccgattgactcgttgtcgtcaaacgctgcattcatttcatagtgatcctgtggaattgttgggggacccatgctgcgctgaggctgaacaactttcaggctttcggaagctgctaccgcagccgcggccgcggccgcagcggcagcacggtttgcggcggccgatttccttggtgccctaggtttggatggagccgatgtgtgctttggcgctggtgggggactgtggtctccagcaacataatcgaaaatcggagctagttttgtgaggatgttgttgcgttccgcaagctggcggccttccggaagtgggatccatgttcctgtgagcattagctgtcagcaagctaaattttctacgggcttcatagatcctaggacataccttgatatttgccatagcctccctgaactttctcatgtacccccttctggacctctcgttcaagaatgcgcgttcgtgcaggcttatcaaaccctgcggctttgaggatgtgtgttgcattgacccaatcatcccctctccttctcatcacactttcagtgtcgagcttgaactcatacacggggacctgggagagagaacgtcagctgtgcgcgcattcaacacggacaacaattccaggccagcgcagtgaaaatatctaatcaaggtatacttacactgctataggtagcagagtagatggtgtctctccccgccataatgtgcgtcgcgcgttggccgctacaattcagtaggttcccgaagagcgatgtaaccgcgcgcgttggagccaaagcgtgacccctagaagacccacaagttgatcggcttaagaattcttcagaactagatgcattgcatgcaatgaaaatccggaccaagaacacagagatacgattcggtggagctggggacatcagatacgcgctggacgcgtaaagtgcgcactagtcctgtttcggaagactatctgtcatgtgattttgtgtcatgtgaccaatatcggcccagcaggaacctcagacgaacgggaatcgccaaccacgccgttttgcctctgtttccccgctccttgcctctccaccccttaattctcgacaaaatgactgtcattgaaacggttaagagcgccgttggcctttcggagacatccggtatgattcttaggccattgattaacaatcataagctctagcaggaaggttaaccaaattccagcaacccgccaggaaatgtcggaagcccgtcttcccatgcagtacagagattcatgcgcacacctgctgatcccgttgaaccgatgccggcaagcagagtactaccttccctggaagtgcgaggtacgagatccctcgttttgatgttcctacacaacgccattcgaccggagcgcttccagagctagtcagctaatgttttcttttcttttgtatcaggatgaacgacactcatatgagaaatgccagtacgaagagttcaagaagcgcgtggccaagatggacgagctgcgtgccgccaaggactacacccggcgcaactgaattgtgggactgttggtatgcgcagtcggtgctgctgttaaagcagcaggatatgtaaataatagatacaccgaaactgcttatggattgccttttggcgttgggacctttcatcaaaatcggccactttttcttcgcccatctgaacaacaatcgcatcggcaacttgatgctctgtttagtattggctaggctggtacccatgcttctcgggctggcctttttcttgggccaagcaatgtctatggacaactcgtcctttggcatagctcgagcgcatgtaagcagatggcatggtgggttataactctagtggactctaggggctttgaataatcaattcattggagttcctctgtgatcaagacgctaggatttatagttcttttggtgaacttaggccgcactgctttgctctaggcaattatgccttccaatgctgttacgacctaccgatgtgaagcctgtaagctcatttgagatatttacctatgtattttatagatctcgccctatattaaacatcttgagctatcttgagctatgatcatcgcatgttgtctaattaaccccatttagtcctgcgtccaatgaccgtttgcggctttataagcttaagccgcaagttctattggctgtattgcggccgattggttgcacgatattatactaattgtaggaggtatggatggtgataattgaaacagctggacaaattgaataagaccgaaaaatacagtctttcctatatagctcttgatgaagagctacccagatgatttctctcatatggatgtctcatataacatcgcattataacgcgatacctgcttatttgacacttgctttcatgcagattcacgcagtagtcattgaatcatatcaatcaatcccttatacttgtgccatgttctatgtgatatttggcatagacttctacctatcctataggtaatagcatccccacagtttagctgaatgtgggtatcgaacatcattcaagtttatcttggtattaactactgactatcatatctggatccattttcattccctttgtatatatacaacgctcaggcctataatagacgcctttatggtgatcctcgaagacgcaagtgcagggtcttatctcaccacttctatctcaccacctcaaagctctctataccaggacactccatgttcaatatctcccaaattgaatcaggtgaggaccttgataggattaccttggaagtctctagagcttcaccgtgacaaatcatgattaataatacaagtcgaagatttggcaggtggaaataaaactcccgccgttatcgccgcccccgctagaaaatcggccgaaaacttgaccccctcattgcgacttgccaggaattacagcgaatcaattagaaaggggactatgcgcaggtccatgtctctttgattactctcggtccttcaatcttcggctttcctgttcactctaggattgtcttgattcgtttatcctatacttgtgtctgggcattttgtgttgtcagcttgagagcaacgtctcgacacaatgggacttctgtatgtgtcttgagatgcttgatttgctatttgggatccctctaatataaagcagggcacttggaacagcgctggaatggccggaagccaagaaaaaggcgggccaagtacgccagtggggtatcgaggtatgccgcgtctaggtcgcaatgaaacaatttcaaggtgtctgacttgattagcaattacttgccaattggcgcagggcacgaggcaaagaacgcgatgctcttctttggggcgacgaggtatgttgttctggcccgcgtatttcccggtcgcaatcgctaatcaatgccctctatgatagattgaatacctcgtggtagctctggacgacgcggcgaagaaggcacggctatctctagcccaggctgagatcctgatatcacttgcaagagacgaggagttgtggaagtctggctccggcaagcgcagtgcaactggagaccagtgagtgtgattgatgtccaacaggaactagcatgtctgacatcaaccagtgaaggagaggagccgcctcatttccaccccgaatttggaaggttcatgttggaggctactcctggacagccttggggaatcgggttcaaagacctcctcaaggtggagtccaatatgaagtggaggtgagctctttagcaatacaacttgactcgaaacatgctaatagaccccaagacgagaagttgcgaaagcacacatggctccgaatgaagtccccatcaccctcacaactttccctcggctaggaaccagtgatgactacatccagccatattatcccccatctgggccagctcttcgctcgcagtttgttcctgatgagattgccaatccgcatattcgattccctactctggctgccaacattcgatcccgaagaggtcgcaaggttgaactgaatgtacctgttttccatgacacaaatacgcccaggccattcaaggatccaacagttaactacgaccttcataattggcccgaggatgatgacgtccgcaacggcgcagccaaagatgaccatgtctacatggacgccatggcatttggaatgggcagctgttgcttgcagatcaccttccaggcaaagaatatgacagagggcagaagtctttatgatcaactgagtcctttggggcctattcttctagccctgaccgccgctacacccatctataagggtttcctagtggacacagatgtacgatggaaccaaattggcaatgcagtcgatgataggacgcccgaagaacttggcgaagctgtaagttttccagaatgatacccttagcccagaactgacctctcgcagcctctcaagaacgaccgatggagaattcccaagtcgcgatatgcctctaattcgacttacatatcccaggatcctcgtcttcggaaagaatatttcgatcctgatctagttgttgatgaggatattaagaagcgccttatggacgggggaatggatgagctactcgcgacgcattttgcacacttgtttattcgtgatcccttggtcattttctctgaggatcttgaagaactagatcttaacaagagtgaccactttgagaatttacagtctactaattggcagcacatgcgtttcaagccgccgccacctgataaggatgatatcggctggagagtcgagttccggtccatggagatccaaatcacagatttcgaaaacgccgcatttagcattttcatcgtgctcatcactcgtgccatcctgagcttcgatctcaacttctacatcccgatccagcgtactacagagaatatggagacggcgcacgctcgcaatgctgttcttgatcggaagttctggttccgcaaggatcccttccctcgcagggtgcccagaagcgcacagcactcggcgaacggcagcaccttctcatctacgacatcgtcggctattaacactccgcctccatcgcctcctcttggccctgttgagacagaatttgatctcatgaccatcgatgacatcgtaaatggatgcacagatggatcattcccgggcctcatcccgcttgtggagtcctacctcaacagcgtgaatgttgacgtcgagacaagatgtttcctggccagctatctggatttgatccggaagcgggcgaatggcactctttggactggggctcgttggatgcgtgagtttgtagctaagcatcctagctacaagcatgacagtgttgtgtccgaggagatcacctacgatctagtgaaagcggttgaggagatgactgccaaagagggaaaaaacggatcagtcggatgggaacttcttcgaggcaaaaaggtctagactagagcatctacatacccccacaaatagatatccagagtgtgagcatgtatggcggaaacttgaacaatttgcatatattcatgacaatcggggacagcctccttgtcacagcgtctgatgaatcttaatttctcatttctcagtgtctccaatagtactcattccagcagcatttcctcctcagtcggcaaccgacacgagtccgccagcccagtcaccttccattcgccgttgagcttatgcaaaacaaaaagctccaccccaacatgatccaccacgccgttgatcttcgcccggaatggcgcccacacagcggccaggttcaggctgcctgtctcgtgcactttcacctcaggatcccagatacgttcatcgatatcgtctttgagcccagcgacatgttcaacgaacgaaccaatcgtacaaaaacgcagggaagtcggagacggaggcgagagtgtcatccctcctgctcggacacagtgtttctcgaaatcagtgcgcgacttgctgctcagtgctgcgaggaagccttgcgtgactgcgataatggcggctgtttcttcggattgtagttggattgctgccccggtgcgagagcggttcggtaatgaccagcacattgatggcatgatttagatgggagaaagcatcaacattgttatattttcgatcttcggtttccaggagcaaacatgtcgatatacgtgtacctacatatgcataccactattatttaggccacagctgttaccgttacagtgcctgtcggcctgttgtttcggtatgttacactttgtccaactttgttcaatttcagggatttcaggaaccctgcgatcttgctgtcgtacgaggataagtgcttcgtgtcacacatcgactttggtgcttggtccgggtttcgttttacaatgttgacgtccgcttttggttgaatttggtgttcgtgttactatcagaggtctgtggtaactctagctatgggtcaatttatctccttttcctatgcaaatccccgggccgagtgcaaatgtatccttgagatctttattcacttacctcggccagcgcaaaagcttcggttaatcttcggactgatcaacatggcctacgactaaagcaggcaatcgtccgtcaaacttttgagaaaatggccatgaagccaaatacgccagaacatcctgaaggtgtattggtggatgaatagccatcccacctctccgcttcctgccataatgcagatcctactccaacggctcatcattccaacctgctacgtatcttgtccgctacgatcagagcaaatatcagccgtccacatctcccggctgttgatcatagacgattcaggtgattgtggggcttccccgcatcaccaacgtcctgagaccttccagtaacgatcctatgtataccccggagtatataaatgaaacatgaaatgccacacattgggagggctagagcgggcaagggcgtgtccatttataccatcatgattggatttgcagccggctttctactatggacagtagtccatgctgtccctaaaaaatcatctcccacagcggcagtgcgcaatggaacgtatgctggagtgcggagctcaacctacaatcaggacttcttcctgggtataccgtatgcccagcagccggtggggaatttgcgctttacggtgccgcagtcgttaaatgctagctgggatggtacacgcgatgcgacacagtattcggatatttgtgttggatatggcgtgagtatgattctttcggttgctttccaaagttgattcttaccaataagaaatagacggactcgatttggtactctcagtcagaagcatgtcttactctgaacgtaatccggagttcatctgtcaacacagagtcgaaactccctgttggggtgtggattcatggcggtggattttatgaaggctctggtgctgatgagcgttataatatgtctgcaattgtggagaagtcgtatcaaattggtatctccctctctcttggatacttgaagcctggtctaacgacgattcaggcaaaccgttcatcgccgtcacgctgaactatagactgtccgcatggggctttataagctccagtcaagtttccggcagcggaaacaccaatctcggattgcgagatcagaggctggcgcttcaatggatccaggaaaacatcggcgcctttggcggcgaccccacgaaagtcaccatatggggcgagtcggcaggtgccatgtcagtgggataccatcttacagcatacaacggacgagatgacaagctgttccgggctggtatcatgcagtctggggggtcgatatccgcgaatccgggaaattacacgacgttccaatcgaactacaacacattggcctccaacgtgggctgcctagacgtcgtggattcactgcagtgtcttcgtgaagtaccattcgagacactcaacgctgttctcaacggcacggggggcaactctgactacaatttctggcccgttgtggacggggacttgattcagacatggggtagcattcaactaaacaagcatgcattcgtgaaagtccctatcattgccggcaccaatacggacgaaggaacagcattcggacctacggggatcaacaccacagagcaatggtatcaatacttgacaggtacctaaccaaatcttctacactgccacagcggctaaccctccagacgggggattggacttccaaacacccccctccgtagccaagcgcatcctcgacctctaccccgacgacccctcgcaaggcattcccgcatacctaggcgaccagcgcgtgccctccaaagggtacgaatggcgacgcacctcggccttcgccggcgactggttcatgcacgccaaccgtcgacgacaatgcgaagcatgggcggagacatcaacgcccgcatactgctaccgctttaacgtgcactcggcagacacgccactcctttccggcgtgacccatttcgaggaggtagcgtttgtgttccacaacattgccggactggggtatcactacggcaaaccgtttgccggggtgccgcagtcgtacatcgacctcagctctgcgatggcgggcatgtgggcgtctttcatccacgacctcgatccaaacccgaaccagggcgttgtgaaacccgctgtgtactgggattcttattctagggacggacctgttgatctctgtctcgatgctaatacgaccagtcatatggaggcggatacatggcgccaagacgggatcgattatatcaactcggttgcgcgggctttctggcggtaaagggggttacactgtgattatagaagaaatggcagatggcctagattgggcttacaaatgaatcccaaggtcgaatcggatccgagggtcagggccaaattattaaagtcgttgaaccatggttctttctcttcatatccactcagcacgcgggtattgcatcactgctcagttgccgagtggatcggttccaaattatgccaaacacaaacaaatatgtactagtactagtatgtatagatggagtactccctgttcaatatccaaaataaaaacagacaatctacaacgtacaggtcatagccgaaaaaagagtgcgtcaactgtctcagctctagtttgtctgaggccgcgtgtaatctatagacgccccgtcagacgcactagagttgtagatcgacatcgcgatccaattccacgtctcactagacacgatttgcagtcagctcgtatcccgaaccatggttgcactcccgaatcgtccggaagatccaataatgcatttttgctttttcagacccacgatacatgtccatcctgaaaatcagcccgagtcataagttgtagatgagacttgatatagtgggtcgctaagcatccctttacagctacctatattggatgcgcactatagacgcctatcgcgcggatcccaaggcaaatccaggttggacgaactaatgtcttcaccacggctacttaactaaccaactacctaaccaactacgtgagctggttaccagttacggacaggagaatagacatctcagacatctgacccgtgacgtggccgagcttagaattataaatccactccagctatccatggatataggatctcacatgccgatacgatgccagccagcctttgtttaactatgggtaccagttctacggaaattggaatgcatagcatatacctacattcccaagctcaccgccacaattccagcgccggcctgggagccagagccaatctcagatcgcagcgggagatgctgcattgagtaaggatctcagcaagatcggggcggggctgaaattctacgatttgaaactttcatgcagggctagcttttttaggatggttgcctccttttccaaggagtgtatgcatcttcctgcaagccatctggaagatctcgctcgatccggggtttcggggcagatagagatacagatacagatcgatctcgggagtatgcacttcttattgaacttgtatacctaacaccttacattgcagtatgttgtatcctgatatagatatatccccctgtctacaaagtattgtatgtatgtatcatctcccgtattacacatacgcaaacacagatcagcaaccaaagcccctaagccaagactggaaccaatagtcggatccaaccggccgggaattcgatgcgtctccacccatcgccccacgatcgcctactattggtctcagccagatagacttttcactaaaaagggtatttccgggcactcggtttcaataggtcagcccacctttcagcaccgatgtcaagatggagtcagccgcgagatccagttcgcacccgggaacgaccggttggggagtcaaaaggtaaacgaaaacgaaggaatttggcccggggttgggccccagcgaatcaggtggtcggttgatctgcgggtatttaggttttggtttggtgaagaagatcatgatattattcttcactgatatagaacacacctaactacaacaaacatagtgcaatatacgtagtacgtaggacgttgaacttgcgtgtcggatagatccgctgcagttagtactgtaatgtgtgcatcttttattctttagaccaacaatagttgatacaatggaataataaattatacttgtacacgaatgtacagatcctaatgcaagtccgttaactattccatctccacggcgaagtccgatacttctctatactgtaccaccgcaataacccacgatataccacaagcagcaaaagcaagaccgaagaagaaagaagacccaaagaagaagaaccttacgctccacccgactacgcccaaccgggcctggcgccagaggcccgagagcattcaaataccgatctacggcgtaccaccgcgcgcttcagctgacaaaaactgaggtcgcgtgggccctccaggaatacaccgacatttctttcaaacagagttctgacagcagggaggaaccgtcgtctccacagcggacgttgttcgcagttcgcagtgaagtattctgtaaaggagtttcctatatgcgatctacaatacggagtattcgtcgacgatctcagtaactagagtttctcggccagatccaaggcttacggcttataggctgctagggacgatcagcagcgtcatacatattttcgatactgtacatactgtgtggtatagcacgtccacaaattattattagctcgtggagatattccttctccggatgtactccgcgtgtactccgtagtccgtactgctatacgtatacggaccgactttccactttccgcttttcgctcttcgcactgccgagtgcactcccgtgctgtgttgtccaagcgcggtggatggtggatggatacacgaaagttcgctagtccttttttctttcttatgatcctccggtacgagatggagattttcacggagaaccgtagggtctgctgcgccacaggaaagttgtggtgccactaactacccctttaccatagttgcccagtccgtagactgaatatagttacataactagtagtgagataatccatcgtggggataagcggctctcggtggatctcggccgtgtttcgggagaatccagacaaagaaatttactaggaaaaatctgttttcaatcccgcaaggagtatcgtatcatgccatgttgttccagtaggtacggagtatgtaacctaagagctgacggtgtccacctagttaggggggacgaatcggatgaatcagcgtgtcccaaaacggaatctgctttcgagggatccttcctggattggctgtgcgccgtggaaatataaacccgtagacagaggtatgtatacattgtcagcaaaattagacagccgacgtttgtatagggtacggctgatcgcatagatccccaccgggatagatgaacgtgggatcttgatctgggatcgatctcgatcgatgccaaccctgctagctgaatatgattatggttatgatcctcggattattggattctcggggtaaacgatgttccgtccaacgtaagcacaagaaaacaaacagagaacacttgtactaattgtcatcaactgaaagtcaaagccgaagaaaggataaaagaacgttgctacttcctaagtgggcttagcgatatccagcccgcagactatgcaaactctccaggccaccggaatagccaacacctccatccccatgtggactggactcacgaactaagctgtcaaatggatctcaccttcatgacaaatatcgagacgcggcttatgttgtgatccaccggcttattattccttacatgcggaagaatgtggcggtctgtaataaggccacctacaacatgctaagataaatacaagtgatattgtagtaccccgtacatgtctatatcgtaaattgcttatatccaatccaaagaatgtattggccatacccaagccgtaatctaattttaatctaaatttaatttgagatctcatgcccgatcccgatcccaatgtagatcggatctgattatctgaacacaaataccttgcagcgaatgaccgcacgccgaccccccgctagttcaatcggcggaaacttagttctcagtcgggacgatctggtgagttggtggtctttttattggggaatttggatgtggaaaatttagacgatcagctgggatgataactagttcgttgctccatatatggagatctttctggaacccgcgaatttaaatgacaatctaattttgatatcgcatatattagcctaatctgcacgttcaatatctagggtagcgaatcagggaggatcatgccatattgggatgtctacgcttatgagagatggatgcgacccaaagaaaagagatcatgccataaagttaggtgtgaatcagattaatcgagtaaagatctgtagtacaaattcaaagttgagattttgatgatattcaattagtattgccatcccgagccaattccagggatatccatatccaccacagaagaaaaaagtgtcgtaaaccttgaacgtcgaaaatatcgaccagaacataaaatagatgtaacgctgaatgagacacgatcgtacacatatcatatcagggacatactcgaacagaagtggaaagaaccaagaaatgcagggtattgagagatagaggggaacatggaggtaagaacagaacagaacagaacaaaacaaaacagaacatcaaaaaaaaaatcaaaaaagaaaccagtttcagaccaggccgatggctattgaatcatcaaagggggatatctatgctaaagccgtttttctcccagtaccttggaagctgttgggggtattataagaacaccgagtagggaagagccccaaaaagacaaaagaaatataaaaaaagatcacaaagggaagacgttagacctcccaaaagaaaaaaaaaaatggccactgaactccgttgccttctatttcccacctttttcaacgccgaaaaaagaagctgaatgactgagaagctgactgagaagctgagaagctaatgactggttggcgaggaggagtcgagaaccgacttgggcttgagattcgaacccaggctcgccgctttgtgagcgcccatcttgcgagtcaatttggcgtaatgtaggccgcatgcgttacacaacgtccgggcaccatctgggccgcgacgccattctggcgtttcggctcggttgcagctgtggcaacgaccaggaggcgcggctttctgcaaacgggttagaaaagtgtcaagatgtcaatacaggggaaagtctagacttactccgcgccgtttctttgggtctgcgcctgcgaaaccgcccgtgcctttgaagtcttcctggtacatcgccatatggtcgtcttcggtcttgaacgccttgcgctgcgccatctgttcagccagtgcttgctcctggttcaccacggcggtgcgtatccgaatcagggcatcctggttccgccgttgcatgtgaagcatgtcctccacttcgttgagcgaagggagggagcctaacagcgggccggaacgctgcgtttgatgtgcgcgagacgcgtagtgccgtgaaaagtcgagggtgcgcgtactcaagtcggcgagctatttcagtcagtaggtaattcatttaacaagtcattcttgattttgtccatcggttcaaaataagactcaagggcgaatccatacctcattcaaagatgtctccacatcatagacgtccaaatgccgcttagactcgttgtgcggagctagtcgactcacaaatccacccttgacctcttccacccgtggcgcacccatgtaggcccggttatcgtacggagccggcgccggaggatacgagtggccggactgcggttgaaaagagtagttcggagggaaatggccgtacccattcggcgacgccacgctaccggcggaggttggcgcactgtactcatacccggacgaattttgcgaccccaccgaggtgattcccgttttggcgctctgggtcggggattttcccgtgctgagggagttaagtgaggtgcgcgaatcctgtgtgttgatggaggcgagactggagcgcgatgcatcctgcagctgctgatggtacgcgggttcccgcatgagagaacccgtcggcgggccattcgaaaacggattgggcgggcccgctggtccctctgcgctcggtcgtccgatgagatgtggcggcggcgtagggtgcgaggattgtggtggcggggcggaggttgctgctgggtatgggagagggtcgttgccgagggcctcgtggatggatgggagggactgtcttgaggtgcgtttttccttctcgtcttcgagggcgcgacgggcctcgggcgacgagatgtaccccggcggtgcgttcgcgtaggcgtacggcagggattggccgtacatgacgttgggactcatcagagtcggagaagcggtggcgctcgaagggtgtctggaggtgtatcccgatccgtctttccctaggaaactcatcgccggcaaagggtctctgtgacgaaggtgagcaatgggagaccgactgcgaggtcgcaagaccaacctgtgcctagatgcggcttccaaagaccccatcacgttgagaggagagaatgttgatgcgacaggtctgggaggtgagaagaagggaatgcaaatgcaaagtcggaggtcgcctctggtgcgacaggaaaagcgttccacctgttcgtgccgaaggaaaaaagaggcccagatccaagatccaatccaacgatcccggggcgaaggttggaaagtggcgtttagatggagcccgagtaacccgacgagttaaccgtaattaacttcttttcttcttttcttcctttttccttttttttccgttccctcttttttttcagatcaatgaaacttgggaaatcaagagaagagataggaatccaagaccacaaaggtaccttgaaatgcaaaaagaaaagaaaaaagaacccgatcgcacatgcaagggatataaagcgtggaaatgagaatgtccatccaaatatgaaagcacgaggtggaatggggacaaatataaaagaacacaccgtagagaggggaaaggcgcagaatcaaaggggatcgaggctacttcatttcgggctttagattggaaacgggaagcttagagaggagtacggagtacaggaagttaaattgatttttgattttgaattctataaaagattaaaggaaagaaaagaaagcccaaaagagaaaaagattaaaaaagaaactttggcaaaataaataaaaaaagaaaagatcgagatccgaacagggggaaaattaccctgggaaattgccagatcgtcagaacctggttttacaaggcaaattaccgactgcggatcatcgggatcttagggctttagttatctgtgggtggtgggtagagctgtggatagaggctgtgcaatattgtagttagcatgacatacaatataattacatacttgtccgaactcatctggtaatgttcgatacattactacgatgttgatgttgtatgttgttgacccacaccatccaatatctagaaaaaaggtaatcaaatgaactgcaaaatgaactaatttaaattaaataattcagaaattagcctaccccggaacctaggatcgatcgagattaacggccgattctcaacgtgctaagggacggctgaataccggcagagtggtccatcaggaaaagaagctagcggacgatagttccagtattctggaatcagtattctggaatcaatctattcttatattaaataacaaatagcgcagggcaatcatcgagtcatttccagatcgctcgacgaggatatgcacccgtgtcacatgagagagatctccgatgcaagtgggtaaatgtcagcctcgggcgatgagctaaagtcctggggaggttataagtgaaggatatgatgtcagatctactataacatagtaatggttagatccattccctggctgtattacagatgcaacccaagtgccaaggaacacaagaataatcaagatctctggaatggagacacagctatttccatcgcaactgggggaatcagagacgtggctgaggttacacagtccgatctgaaagtgcccgacgtggtccggatgacaacgttccatggttcactcgagtttaaattattttatctctttgtttatttatttagcatttggattcattcccgttctacttgacatactaccatctacctatgacttggaatatactatgacatatacttcagatgcaatccttaagtatccaaatactacctacgtcaccgagccacaacgtccccagccaagatcgggcgcaggtgaaatcacaaaacaaaaagcaaaaaacgccgccgaaagcaattgaaaaacaaaacccaattaatcaccacctcattcgtccgtctgacacgctacccccttgagtacccgcctaaaggatcggatcgcagggtattgcaacacatgttgcttaagctttagatcgagatcgaacacgggacgtttattggcgagatcgcgtgggcactccatctcagtttaagaccctgatattacagtagagacattacagtagagctgattatatataagtgagaatcagatacggaagaacagacagtcctagcaaagtcccgcatcaaaccccgctccgatagtgcctagcgctgtctctatagtggtttggaactttgggcttccaatgactaattccaccgattgactccatgaccaactaactattccgtgcagctcgcaaaagcaccgaaggatcaaagctcgttaggaaaccaattttctggagctttgagtttgttggccacagccccaccccgttggatgtcatattcgcccttcacgcgctggcatgtggacgaatcttgtcttggctacggaggcacggagtactacaaatcaaaattctccattctctagtttatcagtcccagtccctagcggtggcaagtacaactgttatagcccgattcgcctccgtgatcgcacagcgcacagactcgggacccatagtgatgtacgatatacatcgtatgggccaacggtcggcccaaggtctaaatattgatccaaaaccggtgaaaggtaatcgcgtgagatcttcggaatatcaatgcggttgatcgacggaggacgcctgaaggaatatgtaatctcgatcagccagccatacggagtacaaagaatatatgatatcttttccatgcataagcaagagcaaagcccggtctaatattccccaatatatattgagtcagtaacaaggctcagctcagctcatgcacctcggtgtttaagaatgaatgtagtagcgtactcgcataatcgcgaatctcatcgcacaatggacttgttgacgggtccgaaatcatcgcgaatcgatctagtcagtagtcgctgcatttccagagcccaatgcaccagccggatcttacgatttcagccactctgcgatgcattccgtgcgcactggagatttagcgcatgcacggtaggtcacttccacctgccgagcatgaatgcagtaaggatctggcgctgcgattgggggggattctccacctgcaggataatggcgcaagaataatcccaatgctgaatctgaggatgagactgatcacaagagatctgaggctgaactccctgcgacggttacatttggatatagtaatatagaaaaagtacatcatacgacaagccaagtgtggctggggcgaccgtcaggggcgaatttccccgcgatgtctcgatctgaactatcagaatcgcaactggtcgcactcgcactagcccggtcgcaggacgctatgatgatgatgaatcataagtataattcctgtggttgtttttaatacgggggaaaacagagctagttttttatgtcagttattcttctggttgcctttttacggcaactgggagtgcaggatggattacagacaccgtgacggtggttttttatgggtcgcgttccactgtgaatatcacgggttttgcgattgagctagctggtggagaagacgaaaatctctgctttcggaattgaagatattcagaatttcacgtgtttggctggaggtatttgagatggccgcaaatgcgccgaaatttatctgtagtaaccaatgagatgattctacgagattatccttggccaagcgcgtcttcctcctatttacttttactttacggtacaaccgctagtaggaaaatcattgcctttgcagaaatgactttacaaaataactggagacaacggggaccactggagatgatggagacaactggagccatgatcgtagtaagttgatcgacaccgttgacagaccgttgacagcccgttagccagattccagaccgttcaaacattcctggcctcgtcgagtctgacaaaaacaatcccaggaatgttgtagcacgctatgatgtttccgaccaattgtggagaacacgcgataaacagacgatcccagactcctaaccggaaagagatgagcgacaactcattttcctcaagttggcaagagtttaggatgcgatcccaattttagtgcgcgtcgagggaggactatccctttcctccgacatcctgaacttatcaaactatatcatccataaaaggggggtaacctcccaaactatctgatctatgatccaagactattatggagaaaccaatctcagattacagattcatcaatcagccaagaataatcaagaaggtgatctcaatcccgaaaataaaagaaacatccccctcggatattataaggccagcacggttcacgtccgccgtacatagtaaaatctccggcaatagccccagtcacacatcatgccatcacccgcgactccgaaatgtggcggctcaggagatttgtttaattcgcccggtggggacgttcccggggatctctccgatctggacggagtaggctcgaaagagtaagttgacagctgcaagttgaccaaaggacaaggacaggggggggcagggagaagaaagagagggtccgatcccgtccagggattgaccaaggagagacggcacggtggggaagatggggggtttggtcttggaaatcaggacacatctgcaacgccaatctgcacgtacggcaaaggaacggcaccaacgttgactggctcggtttggggactagcagggttctgacacggccggaaagggataggcgatatgacgggaggtgatgtcctgcaagatgcaagatgtcttagtgtgtcttactgggctacagattagaccgaactcctcatcgaagtgttagatctagatatcctaaagttgggaatgtcttattagctcggtcaaattattggtaagggcccgctctatagaatcaacatacgattatggtgatattcccccaagtcatatacggagtatgggttgaatccccactggcctctatgattcaacgacagctgcacgtttcaatcgtccaagcaacagctcagggatttactccttcttctccccatgtggattataatcgacagaccgacatttagaatctccacggtgacaaaggggaaatcaccaccaaggaaaacggggaaatccagccggaccgttcccagactccaccaagcccataagatagaccgcttcgatcggcgggaaggatttcgggttttggcttgtcgggtttctcttggaagttcctttttgccttttctttttctttttcctctagctagcctaagacgggctagctcacgcgaaaggttctcctgagattaacacgattagtggccgtttttacttccatctacacctgaaataggaaggcaggtccagcatctccacaaatcccgaaagaaaccatgatcgcctgggaaatctccgagcaaaggtcggaacggactagcagcgcgcaaagtacgtgaatggtatattgatagcgtcttcacgacgatctccttctgctacggaagacagacccgattcatcgatctacgatggatattgcagccgctaagcagcatgcctgacaaacccttcttcaatctcgaacccacctcagcctaaccaggccggagccgagggccaacggagattaggttgagagattggggagattgcaactccatctgctactctatactcagccacacgaggaaatgagaagaacggcttggattaattaagatccgccggtggatcccgagtggatagcgacattattccctccaggtttccatctttccatggggctccatttctggaatatccgagattgtgttcattatatttacggagtccgttttggtgcggagctcgggagttatctgccgttgggcctgtgctggttgcaatgatatacgtactccaatgtgtgcgaaattggattttgttttttgcgggtcgagacggagcacagttgctggatttgtcttgagatttgctgccgtgtgggggggttgtcatttctgggcttgataatgttgcagtgtgcatccgttgggaggtatcaagcatatctattttaagcagatcgccgtttctttgccttttgggtttatttcattccagctaccggatagaggatggcgcgatacattatatggttgaccttcggcgatctctcgggcactttgagtcttccagatctcagtacggcacaacttgtatgagtgcttctgcaaaggcatctacgtatgatggctgtaagattgtacaacagacaaggcaatcacgtactataaacaaggttgtacatgcagttataaatcatatgcacggaaatccatccgggcctgattgagtgacggactcgcgccacatgccggtgaagctcaaaacgcttcgctattggacaggttggatgatgatcatattggataccttccccgtcgctgtcacacagaggactagcaaggatgttaggaccaaagcttcaacgaggttgcttggcaacaggttatcatatttattcttgatattattcttgatatttgcaattagtattactactccgtaggagatctttttccaaacaagtggcaaatgcatttctcaccttcctgacttgtaacatcagggatttcaatagtaacagatatatatacgaatgcgagggttgatacaaccgcgccaatcacattcatgtcccagtccaaactcaaagcgcgaatcgagggtccagtccagatgcacatcccaagctgcaggtatggcccattagagccttgacaggtgggatatgcacccaagacttttgacgtatgcattaggaacaagcctagccctgttacatatcgctttggacgaataggatcccgctggtgatctcgaatagagtttttcctgaatctgagctaccacacgccaaataggaagtcttccgctgattggagagctttgaatctgacagctgcgcggttccgacgttccgcctgaagagaatgccatttggaatttgatcacttggaatttcgcatgaacctgagaatgccatatttctcccctcgaagttgtatttttatgttttctctgtttcttcaaagacaaaagtacgaaatcctcccgctttgatctcacgtatccacccgatccttgttcactcatactccgtacttttatggaaatctccaatggaagttaacagaaagaacgggttcgccctgagtggccctcgtacgatggcaatttgagaagcggagccggccagaaattttcggttttatgttttccccgtacatttccctgccaatgggccaatgacctatctcaatgctatttttgtctcttcaaggggaagataactggccgactagtggcaatgggcccagcggaaacagatgccatcgacaagcataacccaaggatcggcaaatcgtcgaatacactaaaacacatgggctgggtccccgcagatccgtgtcatatcggttgaaaggggaactgccgtgaaaacggcggtccacggttgatctgacagggtgtggtagggtcttcacggtggggagaggtgggccagagaaaacacgcctccactttcaataattcccgatgaacgccgtaatttgatccccgataccgagtgaaggggcctgtacctaaccccaacgcagtcagggcgccggcggtctgggcagcgtgggcaatggatttacgcgcctactccttctccctttgagcaacccggcgttattttatgggcgtcaatagtacatacatagtaccctccgtgctcgagttccacctctgaagaaacttcacataaacttcgataatcggtgttgtatggcatgatggcctgatccactgggaaaagggcatccatgtgtcaccgcggtctggcgccaatcaattcgtcgcctgctggcccctccactgctgtccacgatgccaactccctgggcctggctctcgggtcgacctactccgtaccttttctgtttcggatcttatagggccaatgataggagtcctgggcccgaggcttgagcggcacagaagcgtctctttaggctaggtgcaggcggtaatgcaatgcagcttgccgcatggagtacattgcagcgggataactcgaaacagatcctgactatctcgtgcggagtgagtacaaagtacaaggtacagggtagaaagtacaagcacatggagatgggtattgtatcagaccgagtcaggttctagttatggtaaggctgttatttgtcagggctattgtgcttgactcatgagcagggacatattttcatattgattttaccaatataggataaggaaacatttgatcttggtcttattccctcttgtattgtgcttgatcttatgtatgtgtgaatatatataatttgatgcattgatgcgctgatgcatcgctggtttcaccgtaccaccaaggttgtttgcttcaaagcaggctacatatatatataccactctctatcaaaatatcaactctcctttacatctccatctctagtaaaagtcatcaactcatataaacacaacggcgtgaccatgcctcgtcgagcggcccgtgcacggagcttggcctatccccactttgagcttccagtaggacacaccttcctcttcaatttatttttaggtccagttgcgactagattttttaacgtcatgtcttcaatcctagttctggctgatattcctaccgtgacacttctgtaccgtgcaaaaaagctcattccttcgtcctcgagatttccgccatcccagtctctcaacaataccatctctatcatccgcaatgacatcaccaagctccaagtggactgcattgtgaatgctgctaatcgttctctcctcggaggtggcggtgtggatggtgcaatccaccgcgctgccggtcccaagctacttcaagaatgccgcggtcttgatggatgtgacactggcgatgcgaagatcaccgatgcctacgatctgccctgcaagcgtgtgatccatacagtcggcccaatctacagaaaggaagaagaccctgtcacgctccttcgatcctgctatcggcgcagcctggaactagcagtcgaaaatggcatgaagagtgttgcgttttccgccatcagcaccggaatatacggctatcccagtcgatacgccgctgaagatgccatcaaagaggtgcggaaattcctggtcgggcctcatgccggaaagctggagcgtgtcgtattctgcaactttgagcggaaggatgtgattgcctatgaagaattcattccgtgagtttattcatttctcgcttttgagcagatactgatgatgactatagtgagtatttacctcccacgccggaggacctggctcagagcagcgacgcttgagtagccatgctaaaatgttgctcgccttgcttggtacatgccccgacacgattgacgaccgctactacatgacctgaacgaaacataatctttgccagcctgtaataccacgatagctacgaaggagatttgctaaatattctaaatattccttgacgaatcgtaagtcccagtgtttctttctctatactggtaacacgtaaggcgaagatgagacattgaccagttcgtacccatactacagctgtcatatcagtaagtgcgatgttatcgttgagatagtcctgtaagcagcttctttcctctctgtattatctcgacgtagacaagtatcttagttacgatctcattcctgagatcgtccacaggtgaatgcaaacaatgcaaacacctatcagatcgcgcctcgatcacgattccagctcgagatgacttcactccaattccaattgcaagtctctcgataaccaaaaccgcataatgaaacacaacaaccctcactgaacaccccatctccaacaaaaccgatccccccgcaaaccccccaacccctcgccctccgcccaacaccaaaaaatgtcaaaaccacaccggccaagaggaataccaaccccgaattcacggtaccgagtgcaagtccacgaagagccaaagcccaaaatcccagatcctataacatacgagggtccatccctctccaaaaaacgaacacccttcatctcccatttcttcacgaacctccgccaacgcctctccgccctcccatacccagtccgacgagcatgtaggactctcagctgggcggtaccgatgctcccgatcgcgctcttcattccagaacacgtaatgcaggtgatgtgggttcgcgggccgtcaatgacaccatacctgaacgaggagtatgagcagacgcacacgaagagcgatatggtcatggtcaatatgtggccgtggggatctatactgccgtttaagaaagagcggaagttggagcgggggatgattgttactttccggtgggttgagtgctttgctttgctttgcttttacttcgattttgagttttatatcttgttcttttgagtcgcgtgcagccaatactgatatattacgcatagctcccctgcaaacccgtctcatatcgcgatcaagcgcatcgtcggtctaccaggtgaccgcatcacgactcgcgagccgtgtctgcggaaaacgcagattgtcccctggaaccatgtctggttggagggtgatgcggaggatccgcggaagacgctggatagcaatacgtacgggcctgttagtctgagtctgattacggggcaggtatttgcggtgctgggaccgcggatgcggtggctgaattggacggactgggactctgataaggggaagggggagtctgcgtcggatgatgcggcgtatagacagagtgtgcgggaccgtgttctgaaggatgctgttcagctcgagcagccttttttgaattgatttgttatagatggggcttggcgtatatcttggcctttgtatttgttgatagtgctggatttcctagcgattttgactgggccttgtacatatattagggagccttgtagatatcattatattactattttgagtaaaatgctgtgctatgcgtgtgcgaaaagagcaagtttgcgagaacgaaaaaataagtgaagacgaagcgctataaaacaggaactgaatggctaagaaatgcagacaaccgaggaaatgaatcagcgatctagagaaacaagccgtatatcttcatgtttctcttcctggtgacggtcaatctccgaggaaatactcatcacccaacggtccttttccacacgactacgtgttttaaagacgatggtgcggccatgcttgcccagcgtggacacatgacgcaaggatcgtttggctttgccttcttcccctatttcctgggctcggaagtagctcttactcaagggttgccagatcacgaaggtgatagcagtatcctcatcgtgacttgtgaagacatctgaatcgagatacacccgtggtaaagcatgcacaccagggttattgctgtcgaatgtctggttggcatacagcaagtcgttttcggtaattagaccagaataaatatagcaatcttccagctcgatggatgtttcaagttcttgatggatgtgtgggatcacggtgccgtttcgccggcgcagtgtgctgcggaaaattaacagcttgcctgctgtaaggatgacatcgcattggtagaaagtggtgtggcgacggggcttgcggtagagggtgccggacatctgttgatgttgtcagtagggtgcatgtatttccgatgttacgctacataccttgatagtccgacaactagacagcgagcacatgttgtgcaagtgtggagatgcctcggctttcgacacctcccacttcttcgcgaactgtccgaaaacggattccatagcttcgtcgatacccaacagcttgagattgcgctgacgtacggcctgcagctccgtggcatcgtccgcgcagcgaatgtgccaatacttcacaagcgcatcaattcgtttgacccactcgtcccgtgtggcaccatcgtacgcctgcagtcgaacgacaagaccattgtttagaaccaattcaaatgttctaccgtcgtcaaactcttgcgttgccccgtcatcccgtcgtgagtctctggtttggggattgaagtccacagcaggtccttccccgatattgggatcagcagggcagctgccacgatagacattgcggacttctgtcacccgacacatatcgatatacccatctgcctggctgatattgtgtacattcctctgcacgttcgcaaaggcctcttcatcgtgtcgtttcacgaactcacgattgccgctggagagccatttaatcttgttactttcaaggggataagggtcgatatcccaagagagcggcatttgatccaatatctcacgggcacttggtacatttccttcttctgggggatcaaatttcggcggtgacgggggaaatgccctggctggccgacagaacaacaaataatgatcttgggtaaagaagtacagccgtttgaagaacatcttgttcatccgctgatgcacacccttctgggatgtgagacggactaggaatccttcgatcggggcaggttcctcctgtacatccggatgcctgattgtagtagagtaatgatgtcttggtcgtagctcaagctcgtgggatgactgcatcccaatggtcccatacatcttctcctcgttgactccaaatacccactcaagtcggtcgtaccgcttccaagcaagtcccatcttctcggtcttggaccaagctttcaagacctcggcccactcggcacggccttcgagcatatccatgcatcctcggatgatggtagcggcagcaaacttgtcatcgacggctggccggttaacagttggattgtgctccgtatcagaatcatctgctttcagcccttcctctatccgaccgaaaggattttgaaagatgagggaaacccccagatcagggacgtgaatagggagggaggtgggacgccgccatccaagcacctggcggatgaaagtgtaccattccgcagagtgcgccgaggactttggccgaaggataaatattttggttccatgcttgcggggacgccaaataacgatggtcttgtcgagaggggaatagaagttaacatgggtatctttgtggttaagctttacttcgtaataaggaggcgttttgctgttcgcacgttgcatatcaggaatcacgcgagtgcggtacatctgaatggcaaatggcgcatgctctatagagcttttgcggcatacgacgaggaactctcgccatttatccacggtccgcgtttccatgcgcaaactgtcattctcggtataatcggcgggaagtctgtcctgcagagtctcctccacgcagaccagcattttttctgctttgacaatctctccgtcctgcactttccggcggtgcggtcgcttggcagacatagtaccttgggtctttgcaatcttatggcgcatcttttgctccttgtgtctgatgttgtcacccaggttgtattttgccaccttcgcagggagtctccgttggattcgcgcatcttcgccagtatcatcttcatcttgtgggtcgtggtgttgaagcgatgctcgagatatgccagatagcttgcttttatgcttccccttgtccgtgtccttgttttgaatcagctgagttgtcgaatcggcctcgcttggaactatggatgtattgatggttagagggttgggagaagaatgaccggccaaatttgtatgatgtgagcccggggactttggtcgcagctcaggcggttccagactgctagatcgtacggtgggtattgatcgactggtatcagggctgggggcctcttctctggcggtgacaaacgaagatgaagcaacatcattgctgtctatgtcgtattgcccccttggtctggctttgggggtgctgtctgtatcttcgccgctgtctccttcgctatccccggtgtttgctctgtcatattccccgctatgttctctagtctctgtgtcgtctgccggctctgtgggtaaggggtcgtcaccgctggcctcagctacagggtgggttagggtcctcagttcccccacaggctctgctgcagattctgcctcttgtgtttctccttcaatctcatcacatcgctccgcagcagcatcatccgtgcttgtgttggtaagtgccaaagcgacctgctcatccaagtcgggtgacgctggggtgggctgatcgttgtgctcctcgtaatgggccgcaatagggcttgcagagaacgtgacggcatgcgatgtatagtttctgactttgagtcgagacctataccaagacttgcgatgaccgtgcagccagccttctggaattggaccaacgaaaaatctccggttcgtcatgtgcaaatgtttggcagaagcatgacgctgtcaagaaatagatcagttctgcaactcaactcaaaggatggtgacataccaattgctggtctgtgtatgagccagtccgcaagccatgataatcttcatggtatgacgggcgggagtcgggttctggtcgtgagccattggccccgtctggtggagagctcatgtcaatctattatgcagtaccctggtagaccaaatggcatgcaccagacatatgcaggagcaagcagatggcccaggcacagaactttcgatcgccatgtgatatggtccgatgacgtcgctgccaggtcaaacgctgcaaacgatgcaaacaagttgttgacacttcaccgcgttggtcttgtttactctgtttgcatcctcccgtggtctccacatcccccgtgccccgccattggcttgcgtggcagcagcggtgaagtcgataatatccaagggtcccctgattaagctccttccaaggtttctctttctctcactatctatcttctacttgaattattctgtaaaaatggctgctatccctgctgacggaacatggtttgataccatcaacaagtccttcgccgatgtccctattggtgcggacgatggcatctcgaccacggagttcctcgaggccgccgagtcactggtgactctcttcggtgcgtattgttcccttgcatagacctgcctcaaactaatgcagagaacatttagatgtgcttggctctgccgctttcaccccggtcaagaatgacctgctcggcaacatcaaggttcgtccacattataccgccggtgtcaacccattctaaaaccccaccagaaagtccgtgagcgccaagaggccgctcctgcagagtctgagaccctgcaggcccttgtcctgaacgaattgaagaccggcaagcacgtcgccaccgaaggtctggtctggctggtccggtatgttcacatgtctcgatcgtgaaatggccaattgcaatggcatctcttcgatttgcacaatctgcatgaaccattgactaatcattgttcttctcacagaggcctcgacttcaccgtccaagccctccgtaacaacatcgacaactcctccgcggaactctcagactctttccgcggtgcctacggcaacaccctcaagccctaccactccttcttcgtcaagcccatcttcagcgcggccatgtctgccacaccataccgtaaggacttctatgcgaagctgggtgaggatcaggaaaaggtcgctgtggcgatggccaaggaggtcgctgctttggagaaggtgatcgccatcctcaaggctttccaggctaccaagcctgctcagtggaagtaagtttgccctggaggccttaccactggattaaacatgtgcactgtgcaacttaatatgtaaatattcgatttgggttcattccagcatgcgagtttgtattatgtagcgaattcactgttttggtcaatctacctaggtagagcatggcgtatggggtcgagatctgagcgtcgcgcttataaatcgtaagcttgcgaacgggacccttgtaagaagtagatcagtcggtctataataggacacggcaagacaactcgcagcatacgtcatagcaagcttgaagttctgctgccaataccgcgcgttcggttcgcttgctcgctctcgttccatatgcgacgagcatgtacaaccgagggcagtatcacgacccgttgacttggtacggagtactccgtacacttgagtaggtagatcagcctctatctcagccccacaggtaagtgttccccgaaatgccgaggtcagggggagataacccggttatatatctgccgttttaactttgatctgtcatatccttaccaaaatagaaagggttccatcttctaccgtactccataccgcgatccaaagttagagagaatagcctctcggcacttaggtccagagggcctgacccagaagaccccgtgcgccaaggatattctttaccgatggtaagggtggcctgagagtcgggtacactgagacccatatttgattgtgatctaggagtataagtaaatcccggggtgatcatatattgtcacaataaggccaggataatataggctagatatacaatagtattgtagtgctcatactgatacaatagcagcttgacatataggtagtcagagaatggtccaaagacagcaagattgtcgggatgttgtgggtcagaagttagtgccaggtaatttccgacacaatatactgcagatcgtaccacctccgccgaggtccccgctgatcgagtgtttcgtctcacactggtgactggaccatctgaaggtcttcccccttaagaggagacggtttgcgtatcaatcagatctcgatatcgaaactccagatcagttcatgtccatcagtccatctgttcgagatctcgggcaagtgcgggaatatcgtcaaatatttgccaatagtttccttggcaatgcatgtcacaaaccctggtcaaggatcgtctactccgtaccataccctgggattgccaggttgaggataggcgggagtgcttcccctgacgacggatggcaactttggttagggcttcccgttgtagaatggtccgacactagcatcacggtagcatcgcggtatatacggagtacacaggatcacggactgggatcttttctagcgactccgctggtcataggtgattggcgggaatcagtggagtccatgggctggtatcatagttttttggcttcccgacgtcgtattcagaacagtcgcccggcttccacaagttcggtgcgacttctctttgaaggctagattccgtctttgcatgaagaattttggttgctggaggtgttattggaagggattgccgttttgatttgattttgagttctcgacctgcttcccccacacgtgaaaccttcacggtcccaaggttccagcagctgtctaaccccatcttaaccaacatgcatatcaccgttggccagggatattgactccgtggaggcttttaaacggggcgactttcttttgcctaattacctaattaacccttttcgccttttcttttcttttttttagaaaaatcgaaacaactaggatagtatcatggcccctctcatgttgtagcccgttctcgccactgatgctcgtgatcgtaaggcttgatctgcatggtagcgggttttcccttagggtagtaatttcctctcgctaatatatcgtattcttgttgctccttcggatatccttgcatacttggtagggaaactatacgggccatgaattggtgaccatacattcattctcccggtcaagatgttgcccctcgaaggccgcagcgagtcaatctttatcgttactactgtctttcttggaatttcattcattgccgtggttctacgatgcttcgtgcgcattcgccttgtcaaggcctttggctgggatgatacctttatggtatgcgccatggtatgtatgatagtttcatgtgcacttgaaaccggactgatcgaattgcagctgttgaacatcctgttcgctctatgcggtatcactggcgcattatatggaatgggccagagatccgatgatctcgtgaagaagggtacgatggaaaccgcaatgtttgtatgtccaccttcaattccaagatgaaaatcacatgctaaaccttcccaaagtggtggtggctcggtcaaaccagctatgtgtggacctgttcactagccaagatctccatcgcgttcgcgctcctccgcttgacagtctctaatccccacaaactcgtgttatgggctgtcattgccgtcacttgtacgattggtctggtcttctggttcatgttgacgctgcaatgccaaccggttgagttcttctggcaacgagttcgcctttactcgaaccctcatgccaatgttcatggcacctgcatggagctggaccatatcatcgccatggcctatgtctacagtatcactgctacaatttgtgatctgaccctgggtcttttgccgattgccctggtgtggaacctgcagatgaacataaggaccaagtctgccttggcgggtattctgggaatgggatgcatgtatgtctacccttggaaaccctaaaatgagacttagtactgacctattgatttagcgcgagcgcagcagtcatcattcgcattcctttcttgcacgactacaaggatgtcgacttcctatgtgagtttctattcttatacacactcgataagtgagatgatcaacaactaacaccacactcccagacgcaaccaccaacatctcaatctggtccaacgtcgaagccggcctcggaatcgccgcaggcagtctggtaaccctccgacccttattccgctggtttcgcgatcccagctcggcaggaggaagcaagagcaaaaccaagcgcaccggcggcagcatacccctctccagcatcaacggaggccgctccaccatttcaggcccgcaatactggcggccagacctagaccggccagaccaacatgccgtggtaacgacgattcacacctcaaatgggtccgccactagccggtcaagtagccaggaagacctgaacccgaaaaacgataccttctttcagggggtgaatgtccaaaaaacgttttatgtttcggaggatcagtcatgactggctgtgccggagttagataggctataatatatctaaactttaatgtttccttttttgctctttgccttttgctctttgtttagaacaacggcttgtacggagtacacgataataacgtattctacactgccccgccccgaccggcccccagattctattctcacacaccgggatccacgtgcttttgtcagttatcatgattcattacggttcgcgttcattaagtacatggtatggatcaaagccggcgaaaggccggcatacgctatcccgcttgtagtaacagtcccactctgtcttgctagtggcgcatgttccgatagcagttgaaacgagctagctatgccggatgacgttgtctagcctgagtgttgctctgtgtatcctctttgcgcaggcggaaactgacatcggtaaaggcggtaatcacatcatttttgacatatatttcatttcttttagattaactggctaagcgcggcacagtttctaattcgatactattttaaatattatgttgttcgaggcttataccgatattgcacggcatggtgtgagctcccaggggcttcgtgggcctatgatattgtaggaagttgctggagctgggctaattcatccgtgccctagcctggacccttattagcgtcgttcacacctaatgaatatggcaacaatcaacaactgactaactagttactagctatatgtagttatttgtaggcacgttccagttgcagggtcagtttcgagttctactctttgtctccgatatcgctcggtttcttcatactcgtagcagcaatacatattcccgtcgtctttactccgtagtggataaggcgtcttcggattgggccgacatggtccccgcttcgttatcagatgattccccgggttgaaaactcgggattaaactcgaggcgcgcacaagtgtcgtgttgggagagccgtttgagcctcttggccgcaatgaatgaaattccacttcatccatgttttctcatgattctcgagatcactggcttgggataaagctgcagaaatgtcatcgtttcaaaaaacattcggagtgtctgctagctctgttgattgatcctcttcatccttaccggctgcttggattctagcagtacgagtcaaatgccacattagattgagtaataattggaattaaactatagtgtatgtaacgaagaaaatagtctgcgatctgattcggatgtgcgctgatagatagggagaaaagggcgagagctatctctctagtatgtacaaacgggatctggtccatgcaggcatccaacagtaactcatatgaagatagtggccgattgatcgggtcatcggccgtagccgtgaagatttctcgagtgaacctcatctatatgatatagttcatgtctttagcacagcggctatgtattttggatctttgctctcgaaactttgaaagaatgctcggtggtcgtcctagcttgcggctgggatagggagccagtgaaatgcgatgggcatcggggtcttttgccttggtgatataaataggacaagagacatatgttgatatgccagatacaaatcatgttcttcgtgtcaggaaatatagcctcaatggctttcatcaacgcctcttctttatttgtgagaatcgtagggggatattttaggccaagcgattcatacgcttcggcgagacggtcaaggatgagttcgtatgtgtcctgcttctcgttcttcatgaaggcgaacccaatatggaaagtcgatcctgtggctgcaaagccaacaatggcgagtaacggaagaccgtagcggtttgtattgtacgtatgatccattgatatgacccacaaatcagatttgagcattgcaatatatacaatattgcacaatcctggtatgcgaacttgggttgccagagtgaagttgtatgtaggctttgtgttcatcaagtcttcgcaagctttcggcctccccctttcgtatatcccccgatcctaggaaacttctaggttatgtgaggtgtactgtgccaggtatattgcggaccatgcgactttctcgacgccgatcatcctcaagcttcgacaaagggtttcgggtatcactcggtgtgccacgacgaagaagtggattatttttcagagcagaggagtagatggaaattaaagtgagagagaagtgaagtgcgctcgccaggtccagtcggtgctatcgttggggaccttagctgaatcccagcaatctcgtctccgaatgatcagagttgacggtcatgtctaagaaacattagctcaatatgaccggtagctatgtattgatccgactgaaaaacttacatttagatgtgcttcctcggtgtaagtccaggttgccaaccaccgtgccatggatgcacttaactgggtttgtccgtggtcctcatcaacggagatggaggttgacgaaagaaaggagagttgagagaaagaaagggaaggaaagagggaatgatagtgtggggagggtaattatatatgtcggatgattttctgacaagagattattgaagaggtttgcgttgccatcaaatgtaccaacaccaggtacagtataatcaaattaaaatagcattcaagtagttatacaaccctatatgacagtgtcatatacagttatgcttctcaacgggctgcaggatgcgctaagaccgccacctgcatgtctatattctaccaaagaccttgtttccgtccatggagcactgtttcgctgctctcttcaacagcccggccgggctagctcaatcggtagagcgtaagactcttaatcttaaggctgcgggttcgacccccgcgttcggctattcctaaaaccaaacctgagatttcttttttgctcttttcttttgcactttatgaaagcaagcaccgcggaggtcaagggctgagttccctgtcatcaataatgtaatgctgacacgccaaggattaaccctgaaagagaagcttcccaaagaccggactatatcaagattggaaggcttggtgggtcacacccgcttagtcatattgaatccggggcagccctggacgggataaccatgggaacctcaccctcatgcttcaccttatgatcagcaacaatgggtttgccgcctcttgactcggacattaagttattatcaatcaaaagagacatcagacactcaggcacttcttcgatttatgagatcaatcttggcagcaaccgctatgcaatgaaactggtgggtcatagagtggctctcgctagcattggacttgagcctaatactggtcgcagttccacgatgagaatggagatccaggatttgcagacaacggcagggatttgaatcggtttcgttgtgaatataacgcctataccaacttgctaaatttcgatgtatgcgaaagcgggctcgtcccacgttgctatgggtatatcgatcgcctcgatccatcctcttttcgcccgcacctcgaccatttcttaaccgatgaaatgcatccgagagctatcatactcgagtacttagaaggtgccgaagaattaaactgtgttaactattccgaagagcgtctgcaattggccattcaagggatgaaggaaatccatcgcgctctcatcaatcaccatgatgtttatccgaaaaatatccttattgtacctagtcgaccggagcgagtggtgtggatagattttgatgttgcaatgtcctttaagacacaagattcgatgggacggaaaggacagttggaatgcgagcatgaagccaagctgcttgctagctttggagaaatactggtaagtcttcccctcgttcaacattgtgcccctataattatagaagactgatatacgttaccagcgcgaggatcaaaagcagggtttgcctccgaatacaaaattttattagactaggatttgcataccatcgtggccatgtctccctaggtgcaatcttataatttgtgcacctcgtaaatgaataaatgtggaggcccacagccaggactatatagagtgagtatatacttctctggattatcccgtcgacaccgacagttactttgtgacgtcaatcttggagttaagagggcactaaagtaagttccgtgtcatcagtatcaatcccaaaaagcttcccattgaacagtgatactagacaaaagacatatatatcgcaattatatctttctctttttatcgttctttcacactcagtcaaacaacaatctcaattccaccatgagctccgttcaaaaagttgatttcctcagcagaggaatcaagctcgttggcgatgtgttcctccctcctgggtactcctccaataccaagtacccggcggtcataatcgcccatcctatgactggagtgagagagcaagccccgcatgtttattcgaaagtcctgacacctgccgggttcatctgccttacatttgacgccgcctaccaaggcgaaagcgagggccagccaaggtatctcgaagacccagcccaacgagccgaggatgtcagggccggtgttacctatctttctctgcgcaaagacgtcgacccagaacgaattggagctcttggtatctgtgcctcggggtggctatgtgccattcgccgcgcaaaatgaccaacgaataaaggcagttgcaaccgtcagtggcgcctgtactggccgaatgacaagagaaggccttgtggaaggaatgggaggtcccgagatgctgcagcagtcgatcaaggctgcaaacgaggctcgactcaccgaagcgaaaggtcaacaggatccagttagccctgcctttcctccaactgttcaagatgtccccccggaatacccacccattgtcaaagaattggcagaatagtacaaaacaccgcgaggtcagcatgaatgtgcacctggtctgtttgcaactagaagtgcggatcttttggcgaacttcgacgcctatgctttcaactacctgatttcgcctcgtcctctttttatgatttctggcgctgacgctagcacgaagtactacagcgaggatgctatgacgagcgctccttgttcaaaaagcttcggtcgacggtaggcccaatactgaatttcttgtatactcgctctttgagttcagaggaaactccgctggtgagcatggctggaactgcaccttccactgcatcgctcgcgatatatgctgccaaagctgacgagataatcagattacgcatgggcttgtgaatgagcgaatggacgtactgcgaaaatgacaccgcaagcatctttgactcgatagtcactagctccctcataatggaaagctttttgtccggactcagctgatcccaggcgactccaagctgtgtaccagatgcttcttccataatgatgtattccgagccaacggcgttatttgatgtggcactccaatcaaagattcggggcccgggaatttgaaggacatctcgagtctaggttaagcatgaatagccgccgtgcgattaaggttcgaggtaaacttacaagctccgtggtagcgacctcggacgcggtggaatagaacgctgggccggcatttgggtttggtatacgagcaagcactatttttccatcattcatgatcaaacggaaagactttgttatatcctcccccagccaatttcgtcatggagatacagctgtctgattgaacggctttggagctcagtaacgttgaaggccttatacctgtccttaagctgctgttcttcaccccagagccattgtctactcgtataacgaaggaagtcttcgtaatcaggatttggtgttgtcatttgctcggagagattcgtgactgtgcgaacgacgcgaaacggaggaagggtagtggtcgttgattgtaaccgtgatggtcctgaaatgagggacgtccgtggttgaaaccaatgtactgaacagtttctcaactttggaaaggctgaaagtgcacgacgacgtcctgtgtcaatgttcatcgctacagtacgtaatgtctggttgggaacggttcaaacatcatctgcgtcgggcgccggaggacgtgtttcgctcaccaggtcaccggtattgattatacctatattgtataccctgctggtaaataccagtactgtgtgacctggtaacctggtaaacccccattcggaggaggtggccgcccgagtttctttacttattagagtcacataactaactaatacctaggcattctataaacttggatgatctagttcccaatatcaaagataacaaatgaaacacctgtaataatgatgggatcggtccccttagtacatcacatatttgatgttggacattacggtgacgcgctttcaagataggccctaggaataacctcaatttccgccagggggtggacctttatttaacccccgaaacatcttgatagaatcatcttacgctttttttttggtttgttacagtgctggcattgtagcatgtcagaccaggccttgtcttctttcatctttcattttcattgctttgctcctttgttccttattcacacgaagctactaactataacctatataaatcgcttcatggtagtcatagtaggtagtagttatttctgtcgttggcatatgaattgaccccaggacttgtcatacctctttgcttactctccaacacggactgctacgtggatcatctctcgactaaacgatataattgctacgcttcgctccgaaatcaccttgggatttcttcctcatatcaactcctttccacgcgatctagttcgcatcctactgcggcaccgtttcaataccaattcctctataatattcaccatggcaggatttcgaggctttagtaaagctgtgaagaaatatacacttctttctctatggatgtgtgggcaagtggtatactttgtgatatatgtttgcgccatggtggtgattgtttgctctgttgtggctttgtgtgttccattgtccattgttttgtcataggttcacgactcctgcgcgaccttctagtcaaattgaattatccaacatggacgtatacaagttgacatctagaatacctattaattcatccccgaagtagatgtatagcaaagccattgattgtacggagtatatatcctagaaagacccaacgcccgatgctatgcacatatcatcgtaaaacaaagtgctcgaactccaaaacattagaaatatagaaaagtggaaacgagagtagacgtgtgggaccaaaaagaagtaagggaaatatatgtgcaggtagcgcgtgtaaacgaaaacaaaatattacaatcccaacaattaaaactcaagtcaagaacttgcctgcggatgccccgtgtaaacaccttcaaaatcaagaccagcgagcatgccattaacgcgatcgatctcacggctcaagtcctcgacgttcatcgctaggctgcttacttcatcgaatttacgccgccggttggcatcggcgatcatttcagacacgaagaacttctgctcttctagcacaatcagccggtctcgaagagacttctcttcggcttccaaggccgagacggcactgctcgtgtcgctggatagactgctattgctaccgctagcggcaatgctgttgtacttaatggacgaaagagcagattctggtggccggagacctgtcgtggagccattaaccggagtactgggtgagcttgtccggctgggtattctctctgacgcgggggttgtatgcttgaggattttcgggagggatttcaaaggtaacatgtgaagatgaaggaagttgctggcttgctgatatatagcctgctgcagcttttgttgcgtgggggaattggtcggcatatcacggatacgtcgagccgcaacattatactgtgcaaaagaatcaatcagtcgcttgcgcaccttggatgcatctgcaatctgagctgacgatggaggtcgtctaggatccctggtacaatttcgttagtaagtgactagaataccagaacagaaaaacatactgtaaagctgtcaacagcttttggaatctaggtagatgaaggcggatgcctctctcaaactgggtcaagttttcatacgccctgatctccgatggctttcgcgtcatgtccgctttgaagtcgcgtcgatcaaacagtgtcgatttgcagtccttgcacagtcttacatcaatattgacaaggttatcgccattggttttctcagaggtggctgtcgggcctattagaacttagatcaaagccacaagtgagggtcgtctcgggacttaccaggagaaatgctcagcccaacctcactagagcatccggtactcggatcaccgcagacaattcgcccgcaagttctgcagtggtgtctgcgaaaagtatagcccgaaaattcctgttggcaaaatggacaacgtgaaacactggcatcatcctgccagctgacaatcgtttgctctatttccttacgccgatcattctgccatgcaagagaccaaagctttgttgcactggggtgtatttgatctggtggcagactagccaacagctgagtgagacgggtcagtcgtttttcgagtcgggagatttccaaaaactccttatcgacggtctgttttcttattgacttgaatgcatccgttcggtccctcacgattcctgttgcctgtttagcttggttcagaattgaaagcaatgtactcaccattatgatcattgtagccctctcttgacttgtagcaggtttcgcatactcgggcccatattcctcgtacaggttcatgatgtgccgcccgcgagagcttcatttggtacatcgtgtgttcttcgcaaaacagtttcccgcaactccgacagttcacgcaaccgttggtggcgttcaatcgtttcccacatgatggttcaagacactcatcgtaaatacaacttgtctgccagtggtctttggttatgagatcctcggggtctagtagtttcggaggttcagggatgcccgcatgggctgctagtgggcggatagggagaggcgcgccctggttctcgtttgactcgaacacatccaggcctttcaacttctggtttaagactgcgagaggctggaacttccttgccttttccatttgaactttgaaccagtcctttacttcatcttggtggctctcttccaggttctgatggatgtcgtcgagatgtctgcggcaaatcgttaatcatagttaaagcgtcacaaggggaaacaatagatcgatacctattcagctgcagcaaagtcatctaaatagaagttagtatcatcccattacatatttacaacaaagagcgcatgggaacaagcataccatctgttcgctgcagatcggacaggagagctgagcccccggagcagccggggcggcagatatcgaagtgtcgccattctctattgaaatgcgggaagtgaggtcttgagtttcggtcgagagctgtgatgcggattgtgagtttagggaaacgctgctggcggtcggcgagagcacccgtggcttgggctgcggggacggagctgatgtgagagcgcttgggttgcccagaacacgacctccacccagcgtcctccgcgacatgatcatgggggcatgagaagctggaatagaagctgtttcagcacaacatccgttggctgtacagaacaaagttggagttgaccggagggaaatgccaattatgtggagccagccttgcatgtggctactggggccgcctgaggcatcgacgccaagagccccaaatgagatttgatattcgttacgttcatagatatgaaggagaggtgtatattgttatggatttcatttagtttagacctattatatgaaatgaaagcattgtatatccctttttaatgtccacaccaaagccaaggtcatctagtagtctatttcctcttttagcagtatactccgtacatccgtggcgcgtcatacaacatacaactacaaaagataggaaagttttttgagatatacccaatttattttatttgcattctgtctgatttgaattgaagccataccttcgccaacaatgaaaccagactagttgagccgagcagtaacgacagacaggaacaacaagactgtaacgacagacggaaacaacagctatagagtcgctaaaacggacaacaaatcaggctttttttgtttttttaaccttttcatctttttttcctgttttcgcgttttgcttcagttcatacaggttcgtggtctcatgccgtcttatatatacaagcctgggtccaaacccaacgcgaattcttcaaatattgagcccttttaccgctcatagtcacggtggtagctggtaccagtgttggggttgtcgtattccttgtggacacgagaggatccgtcgtcaaatcggtcaacgtcgcggtgtcgataggtgccactatcgttcactcgctcgcggtggtggcgccggccagtaggggtgtcgtaatcaaggtgttggtcgtaggcaccggtctgggggtcgtaagttgtggtgccgcggccggtgttggtatcgtaagttgtggcagtcgcatttgtaccgtagccaactgcgccatagtcgcttgtgccatagtcccgtgtgccgtagtcccttgtgtcgtaggtatcgtatcccacggggctgtaggttgaactcagggtatcataggttgagcctgcaggattgtaggctgttcccgcggtgtcgtaggtgtcgtaggtcgtggaccaggtgtctccgtagttggtcatcttgacgatgtgttaagagtgataatattatttgtgtaatctttctttttatggaatgtaaaaagcaccaggtcagtctgattcttataccctcgtcgtggcgctagatcccaggacgatgatactgccctgacatcactcaggcgaccatggacaagtgaggcaatgcggctgaatggacaaagaagataactccaagtcgcatatctctggaaaaggttctgattgatcgagtttgctgcggctttggttccagactgttgcctcagaaggcggatgatgatggtggtatacttctataccccataggattgacagatgattattgaaccccacaagtgccagatatttaggagtttctgtagatttccaatatgataccatgaattggctcgagagagttctgtttatttcgttctaccaagatcgtattcgttgatcgagaccgcgagcagaccttggggttggctcaacacattaggtggagttcgaggatgaagtcgtgccctcaaatagacataattatgggtgagatttggatgtctagcaaagaacaaaatcgctaaggcaagtcaatagcaggaaagaacaccattagacatcatagacatatcagagcacttcaattatactatgttttaggtgtacagccatccggttggctctatgctgatgtcgactcccacctagtcacaattacaattagctatcccgaccgagaggcaccaatgaatccgacaggaattcagtagcgttcatcaggtctgtgcttccataaacaactctccggcggtttccaggtgctgcacgttgagctggcgcaccctcggcacccggttggccatttgttcggcgaacccattcctgcaagttgccgtactcctccatgcttccaccaccaactgtaaagacaatagcctcgctgaaagcttggcggcgctgtccgaagctggcaccggtgccagggcctgcgctaccaatgccaccaggcatttgcgggtttcgcgatgcggatgccggaggcatggcgccacgtgcgttcgcgctcctcgggtcaaagtagaggtagttttcggtctttgcaatggcagagcttgaagctgcagccgggtccatgatggactcggtaatcttggtcacagtgagatccttgttcgctggtaggaaattctttactcctgaaatgagcgagtcgaagttggcacctaaagcgcccgaggtaatgcgatccgtcaggcgatttgaaagtgaggagaacccacggaatagatcggacgattgttgttctggtgcagatgttgtcatcatggtcatacgcgtgatctcgcgcacttggcggacataggcaagagaggagatgtcgggcacgccggctcgtgtcagggcctcttcgaactgagtcatttccgagcggctgagctcagtttcagtgctgaggaaccaaatcacgaacaagcgcagcttgtccaatggttcacttcctttggaaggatcactgattaactccaaaatctgtgactttgattgtttggtgatggtctcttctagttcgaagaagttgtccaactgccgatctttgatacccttgagcagtgcggtggcaatgttcatgtgcatatcaagaactgccttgcgttcccgcaactcagggagcagtgtgatggcggccttgagatgttgcgcggaggcactggtatcattctggagatcttcaatcgaagaggctcccgtcttctttgtaatctcattcgcatcttccttgtaccgcgtaagctcagcatcaatatcctcagccacttgggggaatggggctccggcattgcgttgccagaagaagtcggtactgttcaagtcataagaccttttggagcccttagcttctggatcgcctgcacctgcatccacagtgattcgattcaaacgcatttcaagaacatcctggactagggattgatatgtccacgagtgagagagcattgggactagatcaatgtttcgatccatgatgattagtaccggccgtgctgatggcactcctggcaaagcgttttgattgcccgagaagaggttatctttggaattgaggatgtggtctcgcagtttccgatccagttttgttgcgatcaattccgctgcaccacccttggggcaccgtatgattgggatactacctgcgcagccagtcagaacttcgttcgatgatccaagataggatatgatacttacccattgtcacgctcacactaaacaagccactaaccactttgtcaacaatcccatctaggtcttcatcagtcgtttttgggctgttgatcttgtagtatgcatcctttccaagccctaaactgaagaggtccggttctgccacaataaagttgagatattgatcgaaaacctgcgcaatatgctcagatgcgccagaagtgactatttgagaagcgaaatcctcgagaagtggccgcgggacggaggataggaagttcacgtaggctggggagtagagcccgtgggaaaggtcgcgagtgatcgcctggatattatcgggggttggttccacgaaatatacaaccgggacatctggaatagggtatctttgtgaatgaaggtttcttggagtcttcgttagcgttggcccagtttagggggagaaggcggcgaccatacagatgaatagttatgccccatgcccggaggtcatttaccctcaggacactgctgatgacatcccggcccatattatcgaagaccaagaccttccatatcgggtcaccatcttcattcaaaatcggagtggagtgtgagataagaccgccggacccggactgatcgatggtgttgtcttcaacaggttgtggatcatgattcaagttcaataacttttgaattgatgctgaaagccagggatcagtaaaggtcaattcatttcaaaaatctagcttgcgtcacttaccgacctgtcggtcccggagggacatggattgcgccatggcaatagttggcagcgctgtgtgagattgggagaaatgctcggtttcaaccaaagcttggaaaggtacagagctgcgcaggaagatagctgaaatatgcgcgcaactcttataataatgatgaggttgtaccttgcactgttgacaccggggttcttgctatcgctccacctggcatggatcccgctctgagctgcgctgacataaatattgcaaacactgcaaacactgcaaacattaaagatcatatgtgtttaattctgccatgtaacacaggggttgtaacttacacggcggtgggccaatgaacgaccttcaataccacaattacggtcaattttggtacgccatcgtaccatcggttaaccgccttgccagcagcttttgtcccttttactctcttcttcaaaccaagtcatctactctaaccatccgtcaacacctttcccccaatcccttcttttttttccgtaaagcgaatggctgtgacgctagattggcccttcgtatgagagccttttacttctctgattcctcaaggacactcttttgggacaaaacttaagaccgagaaaggagagcgaaaagccggacaacaggaacggcccaagaagagaaagcaggagatacaaagtcaagaacacaaggagagaggcgccggagaaaaagctgggccatcttaatacttctacgttgtatttgcaactgcggagccttcgtcattaagctgcaaggccaaaggtaacgccgtcagctcgcggaacaaagtttgtgcctgaggcatacaccgctttaatcctgagtcaaaaccaaaagcaatcgttgttttctctcataaggtacgacagtactcatactgcaactcttgaagtccactctaggcgtatcaaacatgtgaattgtctaatccttatcaattcttcagtccagcagctctacaggcccctgttctgccgtcgtgagacaaccagccaatcatctcacttccctcaccggaaaaattatttatccctccgaacctccgacccacttcatccaaaattaaaaggcggtgagcgccaaaataaactccaagccctgtccaggcaggtgcatgcacgtgattacgtgaggcttcatagtaacttagagaagcttcgactgagcttcaccatggagcaatcagctcaaacccctattcaggggttatctcatgggaattcactacctgctgattactggagcacacttgaccccgcctaccctgatcccgagcagcagcttcagcagccatctcaaccccagcaccagcctcaacagcagcacgattctgcatcgcaaccaacacctcttgggatcggatgggaccatcctgtttttcaacagcagccaagagagctagcctcacgaccagatccgaaccatggcatttactcatcagtgcatcagccttggcagcaagcaaatcctttgcaacagccaccgcaacgaggatatggagcttcgcatcagtatcagatacattcccaagctcctcatttccaacaagatgggttatcttttgactctcgtcccctgagcgcctccgaatcttcgtcatttccatcatttccctaccagcaaaattatttccatccacaaaacacacacatctcagtgccagacacatttcctgaagcacccgcgcagcagagaatacagccacggcaacagcaacaaccccagtcgtcaatttctgcatactctttacctcaaagctactcctcggaaatgctggtaagccgaccctaaatgcccttcgtggtgaccgtgactctaacttgaggcagcaaaacacaattgatttgaccaacgattactccgattcagacccgaatgtcaccatcaacccccagttcctaaattctatcccgcaggcattcaatccacagcagtcttcgttgacaaacaactttattcagggaattcctgcagacctcaaacaacaagggagcgaacagtaagttatcactttactttatggatgtttaaaatgcacttgctgatttttagaaggggtaggcaatttaattactaccagcatgatctttcagtccagtcgcatatggcactaaatggcaacccggtgattccacctggaggtatgtgtagaccagttgaaacccattgtgttagacttaatactgactttcataggattaccagtactgcaagttgtagtccccgataagaagggcgcttctaataagcagcaaacgaagaagacttctcaaaatggccgaatgagaactttatctaagtcagaaagtgaaagttcggatgaatccgatcttgagattgaagcacctgacgagccttctcctatccctccgatccgcccgactgagcccgaggctgcagcgcaatatgataccctccaagccgtgtggtcaccgaggaacaaatggcctggtcctgagaaggtcaagaatgcgctggtagcctacaaagagcttgtcaaaggattaagagatgcgtggaaggaacaagttcaggccatgaagctggctgaaaaccaagatgacaaccagaaagcaacacaacttaaggagaaagtcacttcgcaacgtcgtaccatggataaaattgcgaccacgacactggaaatgggtcatcccaatattgttgagaagtatgtatccctctcctctcccaacccctacatcttccctcccttccatctggctgtaatggccacagaaatcccgaagctgtttgagaaacctataaatattcttggaagcattggatatgaaagcactgtcacgggctagaataaaggctcatcgctctattcgccggtggcaaggcttgattatacatgcgtgtcctaagtacatatataagagtatcagatggagcaaaatggttccatcatatggattctcagatatgcccttcagaagctatctgtgaatctctttggggggaatctctcctatctagaaattggctcaaacttgcagctttgtgtgccaaaattcttgaaacgttatagttgagctcaaatgactgatcgttaatttcatgtaggctgggagagcatcctatggttgtggcggctttatattcgttcttactcgatcgtttccaagcagcagactttgctgggactctgactattaatttgctttcggtaagtttaacgtttgtctcctcttgtgtcaaatgcaatggctaacatggaataagctcttctcgcgtttctcgactttgacagaagacctgatgcaaaagaccaatctttccaaattgttgccaaagtttctcaaaaagggtggccagcaggttaaggacctcacacagaagatattggataatgctgcggcctctacgaagcgtaaacacgagagtgaaaagtccgccaaggaagactctcatccaaggagcgttttagcagatcagcctaaaggagaggctggagtgaagcgaccccgtgaggcggatagcaatctgcagcctggcacaaaacgaatggcagttaccaatcccttgaaggatgtgaataaacatgcacccgcaagcaatggaccggtcaaaggagcacaaagtagtaagccaaccggcgctgcagtgctgcgccctaaagccaatatcgtggcccctaagccaacaagtctctttggcactttaagttcggcgtccaagagacccgggaccacaaatgcggatagggctgctgccgccgccgcagcaaagccaacgtatgtacccacgaaggaactgtttccgaagttcatctgtactaacctttcaaatagtgctgcttccgaaaaggaaaagacaccagccccaaagccatctttctcatttggcgacattatggccgacttgaacaaacccaagcaggcaccaagccccaagcccgccgaagatcagcccccggagactgaagctgagcgcaaaaacaggttgcgtaaagaagagcgccgtaaacttcgcgtgacctggaagccggatgatgctcttaccgaagtccgactatttacccacgacccggatgaagaattaggtcccggcgatgggtcattgcgctcacgaggagacgttaaaggtgaaggtagtgttctcaagcttcacaaagatatggacgaattggaagaagaggatctcggtgagaccgtatttcaagacggttatactctttcaagtaagttattcttccaaatgcatcttaaattcttactgaccattatagtggtcgatttcgatttcgaggaatcaaatgatggcagtttcatcaagcgcggcggcactcagctgcccacgagtcccgagagggaggctcaggagcatcgggaatctactacccttatggtcttctatacctctcctgctgacatgcccgacacaccaaaggaaccaccagctcctgaccccgacgatattgttaccgatgtattgcctttcggagagttgcccgacctggtcaaggtatgctatacttctgataacactacgatccaatacttacaaagacactacaggtccgccaggaacgttactactcctacatgaatcccaagcctacgactccccaaccaacccaacaaccgcagcgacctactcccggagacagtggatttgacatctccaatttgctcaagatcatccagggtgttcctggacaggcgcaaccaatcccagccccgcaggcaactcaacccgggggcatgccggatctcgagaggaccatcagcatgttccgtcaacaacaacctcaaccacaggtccccccggctccaccagtaccaattccacagccgcaaggccttgacttcaacgcgatattgaatgttatgaaacaaatgcaggcgccgcctgcatattcccagccccagcaatcgcaatcagcaatggcacctaacctgggcgccatgttcgcacaattcggtgggcagaaccaaaacggtgctctcccattccgacagcaagggcatgactatgaagacccagagcgcaagcgcggccgcgagggcggttattatgacgacaattctaaccccgaatcgtggagccgctcgaaacgaaccaaatttggcgccaacgaggccaagcctgtaggtacactgcagcatttttttgataagcagttggctaattcttttgaaatagtataaggtgggactagttgcttgcagattttgggccgagggcaagtgtcgcaaaggcgacaactgcactttccgccacgatcctctctaaatcaacacatccttttcgactgatacccttgtactgccgttctctacattggcacaatctttttttctcatatctatgcattactacgttccttcatggtttctttactattttttactgggtcatggaaatgtattttacaactagaattctctggttggcgttcatcgcacggttgcgttccaattcatggtctgggatgtcagcacatattgattcgtcctctgattttcaaaatcctttgcatgcccccccccacaagctcaggcgttctctttttttttctttccacttgtttcgcctttgtttctcgcttcgcggatgcatttagcgagggggtccccagatctgggggctgatattatggcgcatggatggagggcgatgacgaacatgtacaattaggtaattttatttttttcttcacaggcaagaaccatcttcggcgcaatgtcttccatctctagaatggtccgcttggacatattccgaccgtaaaggtggcgttcctaggagggagcgaccccgaaccgtgggcgtttccccatattccctcactggtcgaaggcaactgcttttcctctgcaccacactattggcatttcttcgtgccttcctcgttcagaaggcactggatcggaaatgcttcggagggattcgcaatatcgaagtttttcactgaagatcttaaaacacttgatacaccaggtgtttttcaactggattctccgggaacgaattgtgggcgacatacttcagatccacggaggttatcaatatgtgggaaaggagaaaggatacctagggtctatatgcctcaggaaacaaagaaaatgcatagccacgcttgcaaagggaaggtaaagtacggagtacttggaaccaaatttttgctttctatatcgtgaaatactgccgatatctccccgattctttgttttatccttacacacggacgaggacatccttttgggaaggacgggaccaatatatggacgatgtgcttcgggcggttgagctcggtgctacgttcaactttggccaactggcacaggcaccggcctgtctgtccagtctaacccgcatgaagggccatgaccgcagttttcgactccgtttcgtagaacaactgctcgatattgccggtaccgcgaggcacctggactggacatatgcctgctctacttggccgtatacaggatgtgaatgcgttggtgtgtaccctgcattaccttgcccaggttatgagtgcgacggacgttacagacccttcagtggttgatatcggagtatgtattcggctctgaagcaatttgttgagagtgaagagatccgactatcttggagaaggtcaacgtgcctgatagtgtggaccggcagttgctttgaccacagcctcgctttgatgtatagttgacaacgatttagcaattctaccgaattttactattttacctttcaactttcaactttatagtacacgttggatcaaatcggacggtttgcggtctctatgatccaaggttgacgatgtaaggatatctagttggtttgtgatttttgagacattatatacaacatatcatcttttttggctatcttaacatgcctccggcgtccttaggccaaggcaaagaaaatattccgatggcttcagtccgcagacaagaaggagaactctttctgaggtggcgtgcggttgaccgcccttctcttcgcctcactatcgagggcacgaatttagaagctgaggttgttcagccatcctcaataattgtccatagttcactagcatcgtctatatgtcttgcattgtgataaacccgaatccattcgcttgatcagccaagatccaccagtatgaccgcaaatccagatgccaactttgctatatgcaaccaccttatcattgtctgctgccatgctatttacaccggaggcccaaagcttggggcctcagagagcgagtggttagtgtgaaatgatcttttatatgaaagataccatctaatgcactgaaggcttattgagcccttccagaagggagaaacacccacattcatcgatcatgtcaaagctggattgaaagctctagcagaagactctcatggcttgcttctattttccgggtaagggtttctcatcatatgcttttcaatttcttttcgttaatccattgcacagagggcctaccaagaagcctagaacagagctcagtgaaggtcaatcctacctggtaagaagcctgaattccgtacaaccgatcatccagaaagctcatatatagcaacattcagaacttggccaaggataacgattacttccgagacatgtccactatctccacaattgacccatcaagaatcatcgcagaaaccaacgccacggattcatatcaaaatcttttgttctctctaatacagttccggatacacacgggcatttatccacagagagtcacagtcgtgactcacgagtttaaacgcgctcgattcatgcagtgccacttcccagctgtgggactgattcctgttggcccggaacaaaaagactatatgcacaaagttgctgtgataggtatcaatccaccagtggaagttactccactagagactttaactcggggcgaggctatgaatgggatcgggctttggagagaagatctttacggagtgaacggggatctagtagggaaaagggcgagacgaggctggtcccctggaatagaaaacgatatattctctcatctgggactggaaaatgtggtgtcacatctaatccgctatgatgggcatgaccattgtaataattggttcccgaagcgagagagcctgccttggtcttatactaaacatgatacaaccaaggggccttgatgttgaccgaaacaaatatgcctctgacatagataagtggaaaaagtccttgatcctttcccgaaacgccaatccgtagtatccttcgtatttgatcataatgtgtacccgggagcttaatccgccagccggtagctgaccagagttccaactcggtgattgtttgtgctgaagctccttagttgaaccttctctgcgttcttaatttccttggcatcactgtcgccccattccaccggcacgtctgaatctgcgtcggcatagacaagtacattgaaggtgcagtcaccatcaaggacggggagaaaggtgacagatgcggtgatttggcggaagatggcttggatctcctcctgaatttgtttttctgtcttttcgataggttcgggggtttttgcgtctcttcaaagcgtaaagatgttagattagtgggatgatcaagatgacctcacggtcgacggacttaccccgatgtgctgttctctttgtcaccggctttctgtgagctcttgcttttcgaatttttgccgaagacttcgacctattccgtcacattatagttagccacgggcttggataagagagtgttgaatgcatacgtcgaattgccatctctccacatgttcgccggtctccttgctcgtgataactaccacaagcttcgagatctttcctccctgcatccattccttcaactgggacatgatcttcttgatgtaggctttgacctggtcgtcggccgaaactgctatgaagttagggctgtcgacgtcggctaagaagaacacggttcacgaaccgagcatattgaggccatattttttaatactattttcaattagcttgctgtattgtagtgggtaaagatggagggcatacttacgtcgtgaaatcctcgggaggatagactcctcgttggaagctgagcacccaatgcgatcagccagtgtcttggactgaaaacgtctgtaaacttacaggattgaattaatcgagtattcaaactgagcctgttagtactcagacatcattgacgtaatctaaaggacgactcacgaattcggagacaagcttggccgatcctgttatcttgtaagctttgtacaaccacgataactgcataagtagacgagaggtatggacctttgatcgacagcttgtgcacctttgactttcccttggtttccgacatgatgaactcgtagataggcagctgcggactctgaaggtgaaagaaagatagagccttgtttacgtcgaatggtcaccgcagcaataaacagtcaccgcccgcgcgtccgttttttctccgcaaatcgtgacaagtccaaccagcactcaagtgctgatcgattgccccacggataaacttcgattcgacgcttgcataccatcagcccctcctatgccaccgcagaagtcccaatgcgaggatgtctgcagttaggccgatggctgagcgcagcgccgagatgccaggccgcgagcctccgaccaccaactgtattttctttgtataggtttaaaaggagtttctctactaccacgatttactatggacgttcgaaaattgcgcatataaaactcgacgtaaacctcgagaagagaattgccgcgatcccaatcgaacgttttcgcaatttctgcatcgttgcacacgttgaccacggcaagagcacgctttccgaccgattactcgaattgacgggcacaattgaagcaggatcgaacaagcaagttttggacaaactcgatgtcgaacgagagcgaggaattacggtcaaagcacagacgtgtaccatgatctacaactataaaggcgaggattacttgctacatttggtcgatacacctggccatgtggacttccgtgccgaggtgtcgcgaagttatgccagttgcggtggagcaatcctcctcgttgacgccagtcagggcgttcaggcgcagacagtcgccaatttctacttggcctttgcgcaaggcctcgaattgattcccattctcaacaaggttgatctcccctcggcggacccagagcgggctctggagcagataagaaacacattcgagattgatacagaaaatgcggtgatggtttcggcaaagactggattaaacgttccggctgtgctaccgacggtagtggagaagatccctgcgtaggtttacccagtggcttcccaaagcgctatttattttgctaacttcatgctagacctatcggtgattctaagaaaccacttcgtatgctcctcgtggattcctggtacgactcctacaagggcgtgatcctcttggtccgtattttcgacggtgaggtgcgtgcaggtcagcagctcatctcctttgttaccggtctcaaatattttgttggtgaagtcgggatcatgtatccgaccgagaccgcacaaactgttctccgtgcaggccaggttgggtacatctacttcaaccccggcatgaagcggagtaaggaggccaagattggtgatactttcacaagagtcggttatgaaaagatcgtcgaacctttgcctggattcgaagagcccaaatcgatggtctttgtggccgtatacccagtgaatgcggatctcttcgagcacctagaggacagcatcaaccagctggttttgaatgatcgaagcatcacagtacagaaagagtcttcagaggccttaggtgccggtttccgtatgggatttttgggaacccttcactgctccgtgtttgaagaccgcctacgacaggagcacggcgccagtatcatcattacaccaccctccgtcccagtcaaggtcgtgtggaaaagtggcgccgaagagattatcaccaatcccgccaaattccccgatgatgatagtgtacgactcaaagtcgccgaggttcaagagccgtatgttttgtgcactctgacgttcccagaagagtacttggggaaagtgattgagctctgcgaagccaatcgcggtgagcaacaaagcattgagtatttcacatcgactcaggtcattatgaagtacgaagtgcctctagcccatttggttgatgatttctttggaaaactgaaaggaggtaccaagggctatgccagcctggactacgaagaatctgcatggcgagctggtgacattgtcaggctacaactcttggtcaacagggagccagtggacgccgtaacgcgaattatgcattcgagccaggtgaaccgacagggcagaatttgggtaaccaagttcaaggagcatgtcgaccgacaactttttgagatcatcatccaggctgctgtcggtaagaaaatcatcgctcgtgagactatcaagccttaccgaaaagacgtgctggcaaaattgcatgctagtgatgtaagtcggcgacgaaagctgctcgagaagcagaaagaaggccgcaagaggttgcgagcagttggaaatgtcgtgatcgagcacaaagctttccaggcattcttggcaaaataagcgtgtaaattagcatctaaatacattgtataacactatttctgagatattttctcttgtattaagacattatacaaacatgcgccactcatgacagcggtgagagctttaccggcagaaaaaaagttcatgtcaagacccccgccatataacttcttcctctactcattctcacttcactttattgtgtcaaaataacctcgctcgatatctgtggcttctaattgcatacataccacaaaatatcagagttaattcttcttcgagcctgaaatctggtctggcggctgacgtccgcatatgccgatcgcatcgctttgagtcaccctgccatgctccgcacttgacacggccatgcagcctccagagggtgcgcaggtagacctgggcaaggcccaggttattgacagcgttcctaaagtgatcaaggaactgaagtttggtgtcttgtacgcagttcattcacatgtgcttgtcacaagcgtttgtcgcagacttgatcgctaatgaatatttatgttccagaaccaatgatgatattgttgcccaagcagtggtggaagtttccgaccgaaagtttttcgacttggatcagacccgaacggtcgttgcgaatggacctctcgaccagcgcatgggtatctcgaacaaaaccgattcttgcgcaacatgtggaaacaacctcaaagactgcaatggtcattttggccatgtgagattggtcctgccatctttccacgtcggttatttcaagcgcgtcatttcgatccttcaggaaatttgcaaggaatgttcgaatattctgctccccgaggcagagcgccgtacctatcttcgcgatatgcgccgaccgggccttgataatctacgccggacgcagatagcaaagcgcatcaacgaacggtgtcggaaaacccgtaaatgtacatactgcggagcgatcaatggtgtcgtgaaaaagaccggaacaagtgctctgaagattacccacgacaagttccgtgcattcaacgtctcggtttccgtcaaaaaagaaacgccgatcagcaaggatgtctttgataactctttcctcgaggcgagaggcgcaaacccggaggtcgaaaagcacttcaaaaaggcgcaggatgatatgaacccccttcgcgttcttaagctattcaagaaaatgtccgactctgactgtgagttgattggcatgaatccaaaggaggctcgcccggaaatgttcctatggcaatttatcccagctccaccggtttgcattcggccttcagtaggacaagatggcgcatccacagaagatgacttgaccgccaagctaggtgacattgtgcagagcaatatcaatcttaaaaatgctctactcaagggcgctccagttcaaacaatcatggagtgctgggactacatgcagcttcaaattgctgtctacataaacagcgatgtgcctgggcttaacaaagccgatcttggaaaaccaatccggggcttcgttcaacgcttgaagggaaagcaaggtcgtttccgtggaaacctgtcaggaaaacgtgttgatttctctgggcgaactgtcatttcacccgatccaaatttgcgagtcgatgaggtcgctgttccggagctggtggcaaaggttatgacttatcctgaactagtgaccagatataacaaggaaaaactgcaacgacggatttgcaatggtagcaacaaatggcccggagcgaacttgatcgtcaagaaaggaaccggattcagacagatgttgaagtatagtaatactcagcgaatggctgatcagctgcaagaaggcgatgtggttgagcgtcatctcgaagacggcgacattgtgctgttcaatcgacagccttccctccacaagctcagtattctatctcatttcgccaaaatccgaccccataggactttccgattgaacgagtgtgtctgcaatccttataatgccgatttcgatggagatgagatgaaccttcatgtgccgcagaccgaagaagcccgagcagaagcgatggagctaatgggcgtgaagaacaatttggtcacccctaaaaatggagagcccatcatttctgccattcaggatttcattagtgccgcgtatgtgttgagcagcaaagacaacttctttgatcgtgcctccttcacgcagatctgtctctatatgctcggacctgaaacaagattcgatctcccaccaccatcaattttgaagccccagatgatgtggactggcaaacaagtctttaacattcttatgcgccccaacctatccgaccccgttatggttaacttagacgccgcatgccgtgagttcaagatgcccaaggatggtcgtcccaaggacttggaccccaatgatggctggttagttatccgcaactcggaagttatgtgtggtgtgatggacaagtctacaattggttctggaaagaaagacaatgttttctacattatgctcagagattatggcccaccggcagcagccgagggtatgaaccgtctatctaaactgtccgcccgatggttcaccaacatcggcttttcaattggtatcggagatgtctaccctagtgcaggactcgttcagtcgaaaaacgatcttgttgaggcagcgtactcgcagtgtgacgaagtcattgctaagtacaaggcgggcactctggagaagtatcctggatgcgacgaattgcaaaccatggagaaccagatctccggtattctcagtaaagtccgtcaacaagctggtgacgagtgtattatgcagttgagcaagtacaactcgcccctgatcatggccacttccgggtcgaagggttctagtatcaacgtgtcccaaatggttgctcttgtcggtcaacaaattatcggtggtcaacgtgtccaggacggcttccaggatcgtaccctaccgcatttcccaaagaatgcacgacagcccccgtcgaagggtttcgttcgaaacagtttcttctccgggctggagcctccagagttcattttccacgctatgtccggtcgtgaaggtctggtcgatacagctgtcaagactgccgagactggttacatgtctcgtcgtctgatgaaatccctcgaggatttgtcatcgatgtatgatgacacggtccgtaactcgtctgctgccatcgttcagttccagtatggtgacgataagttggatcccgtggatatggagggtaaagccaaacctgtccacttcgatcgaacatttattcactcagaatccactacgtacaacaacgacgagcgaagcttgttaccgatggaaatgatggaagtctgcgaacagatgctttcgaaggaacgtacgaagctagtccgcaaggacttgctcggcaatgacctggcatatatggatcgcagtgatcatggtatcgatcagttcgaaagtgcccgtgacttccttgactcgattcaggaatacgtgcaaaagagggccgacaaattgatctctcaaggcggcgatatcgacccgtccgatcagcagagccgtaagggcttggatcacacaggcaagctgacagataccacgttgagggctttcatcactgcctgtttgttgaaatacaagagagcccaggtcgagcccggtcacgctgtgggtgccgttggtgcccagtccattggtgagccaggaacgcaaatgaccttgaaaactttccatttcgctggtgtcgccggaatgagtatcacgcagggtgtacctcgtatcaaggaaatcatcaacgcctcaaaggagatcagtactcccgtcgtggcttgcgaattggtcaacaaagaaagcactatcgctgctcgtattgtgaaaggacgcattgaaaagaccttcctccgcgacgtcatccactctatcacggaggtttggtcccccgatgatgcctatttgaaggttgttctgaactggaaaacaatcgaggatctggcgctggagatcacgacgccacagatcgtcgaggcgattaaaaccaacaagcgcttcaagggaggcgatctcaagttctcgtgcaagcaagcctcaatcaaggtccacatggatctcgatccggccagcaaggcatctctttctaagacggagattgccgccacgagcgttgatcccttcctccgcctgaagcatttgaagcgtattcttcctaacatccaaatcctgggtcacccacgtgccacccgagctatcattcgcacggacgagacctcgaccacgaacactttgctcgtggaaggctacggattgagggagtgtatgactacgatgggtgtggacggtctccacaccaggaccaacaacatcatggaggcgcgagaggttctgggtattgaagctgcccgaagcacaatcgtcgtcgaaattagcgaagtcatgaaggacatggacattgatcctcgccacatgcagcttctggccgacgtgatgacctacaagggtgaagtgctcggtatcacgcgtttcggtctggctaagatgcgtgactcagtccttcagcttgcttcgttcgagaagactgccgatcacctcttcgacgccggtggtctcggtcgtaccgatctcatcgagggtgtgtcggaatgtatcatcatgggcaagacagtgtcactgggtacaggtgctatggaagttgtgcgtaagctaaacttctaccaaggccagattggcccacgaaagacggtatttgaagatgcttggaccgaacattgtgaagcgcctttggtaaggcgacccaagaggaaggtccgatgaagtggctgtgaccctgtgactctgtgacactgtgcattaatttcggcgttaagattttggccttttggacaaggcttgtacatgtacttatctgagcggatgaatttcattgacgatatgatcaatagttttcatttgtcctctttgactctacgtgagatgaactattagggctataagaagccgaatgtggagtactcctatatgaccaccccctccacaatgccccaggttcgaacctatcacaatattaaaaaacaaaagtcggggtgtgtacagacgtgaagctaatttccaatacgactgtagaaatatctagggacaagcttcttgggttatattcaaatattcaacctttttacacaaagtacaagaagttcacaacatccctcaacggaatgtctcggattctcaacctatcggtactccatccccaaatacccaaatatccggggatatcacaacgatttccttgtttttttttcaacggctgcagcaatccgaaaagagaacctctaggaatacgagattcgagacccttgggatcggagaaagggtcggggagccgtttatttggaataaaaagaaggcatcaaatcacccaagagagcacccatgtcccgagtgaccagggagtgcatcgtcctccaatcagcatcgtgaaacccctgaggcagccatgggggttaacctttggccatcacatcgcctcgacagttctttgttacccattgccttatccggccacgccacatccgtcagcactcggtgggttgaatgtttctttgtttgctgtgcagtggacggtctctcgaggaattgctttctaactacggcgtacttcgtactgaatatccgtgggtcgcacttaatctttcgcatctcccctcatctatctccccggcctccccgaaaacccccccgcggattcgcacttgggatgaacatggagtttggcaaccaaagaaccgctaggaagcgcgagatccgaacccgagccccgacggcctgtcagacctgtcggctgcggaagactcgatgtgacaataccaggccgacctgtagctactgcgccgtgcaggggatggagtgcaactatcccgaaacatcgccacatcagaaccagtaagataacatgatcgtgtggagaggacaacacactaaacattagccttgttcttagggttggatttgattcggggaacccatcgaacaatgaggtgctccagcgactgaatcatatcgccggtttgctagagaatatcaaatccgaaggctccaccagctcgactcgctcactcaaggaaggattctttgagttggccatgcagaatactagccccatagctgattcattgccggggagcaatccatctagcaccagcaccgctagtatcgatgaccggggagctgataatgatccccgagtcctttacatggctagctccggggagaatatgctccgatggcctattttcaacaaggtcatcaccgaagccgagaaacatatccgatcttttctactcgactcgctggataaccagccccgcagtatgcaggcaccccggcaggtggggattggaagctttgtcgatgagatcccaagactttgcaggaagtactttctactatgccaccgacgaaacccgatagtcgatctggacagtctagaccgttatgccaaggaggtcaccgtccagggtctgggatgggatggcccctcgtgtcaagtggtatgtcaactctcctttggaagtcccacttgaactaagtcatttctgtagctgttagcgtgtgccttggcttcgtgcacgtcatcgaagtttgttcccctagcggatgatatgccagcgaatctcgatgcacttcaagcaccacccatgtcagacgccaatctcgatttggctgagacatatttccacgcggcaaagcagagattcggcttcctgcacacgtccccaacagacatccagtgttttcttcttgctggaagctaccacagacatgccatacgacctctgcaggcttggttctgttatcagcaggcatcttgcagattagaagttcgtttgcggtcgctgtgtagagagcagtggactgctgatgacaattaccataatctggaatcgagactatattggtcttgtatccaagcggaacagtgggtttttcttaccagactcttatatgatcatcaactaagtatcgtcgacagtgagatgcagagcgagctccctctctggagcagtggtcttgaaagcctgggctattcagatccattccctaaattctctcgcagatcttcttcctcatatgatgaaatggatgaagaccaagattttgcagtcaagccaggctttgagctggatggcaccgaagaagagaaaggctggaaattctacatcgggtccatctgtaaccgccgaaccactaatgacatagtgtctgacatgtggtgtcaaggagagaagggctggaccaaagatattcccggtcttctaagaaagacaatggacgcggagcgtgtagtaacatcatggtacgaccaagtcttcgaatatggcaatgaaaggacccctactggccttgctaactctttcaaaaggtaccaaatctcggtatccgggatccagtcccaaaaagacaatccagatctgaggttcttcttccgtggccggtaccacatggcattagagaggatctaccgaccagcgttctacctcgcgatgcacttccaggggatgccagcgtttatcaggaagaacaacgcaatgtgggcagaagtgttccatctggcccaaaaagccattgacaactgcgtcaccctaataccaagctactggtatcaattccgccacgagtggatctggaatgtagtgcgcgccagcttcgcctgtgctgtgcacatcctcggggctgtcttatatcagcttgaagcatctcgggatcctagtacgtggcaggtacgtttaccgtcgaattggactgctttggtgaggttgtcgattcgaacgctgaagcattggtcgtcggagtctactgatctagaggtcatggcgtcgacccttgagaggatgtatcagggtacttgtcggttggctaatgtgcgcccggatcttcatctgctttaattgttaatatggaagggatattggatattgggaaagggatatacatatagggctttgtgaacgaactcttgcgtccacataattatgagatactatgcattgatgatttcgattatttaattatgaactgcttctgcttcaatcggtttattagcatgtcaacatacattatgtagttattcaatcctcctagttctgtatacaactggttatactccgacatccgccccaccacaactttttcctcttcacttcatccctttccaccttcaacctctccagctctctccaaccctctcgaaatggaagaatacaaacccccagctctcccctcccccttcaacaataccatcccaccaccaatcctcctcacccaaggcgccgaagcccatctctacaaaactacctccctcgacccctccatccccgccgcgctcaagatccgcccatcaaaaccctaccggcacccaatcctagaccgtcgacttacccgccaacggataatttccgaagcgcgatgcctcgcgaaactcatacgggagggcgtgagcgtcccagcactcctagccctggactgggagggacatggcggccccgaaggcgggtggggcggcgcctggctaatgatggagtggattgacggtcctgtggtgcgggtagttctcgagcagtgggaagcatggatgaagcagaacgagggctcgctggatgagtcacagattgaaaacgaagaggcgcgtgtgcgcggcttgctgaggaaaatgggctcggccatcggtgtcctgcacaaggccggtattgtgcacggagacttgaccacgagtaacctcatgctgcgtccatctgcggacgcaggtgatgcggttgagggcactggagcgccctctttggagggggatgtcgtgctgattgattttggtcttgcgtcgcatagcaatcaggatgaggaccgggcggtggatttgtatgttttggagcgggctattgggagcacgcatccgcgctcggagcctttgttcgaggcgctgattacgggttaccgggatagctacaagggggcttcttccgcgctgaagaagcttgaggatgtgcgcttgagagggcggaagaggagcatgcttggttaagcctctcgtttgattttagggatgggatgcaatctccccccaactgctatgatcgatttagaagcaaaaaagaaacgccacgcttgtcacgacagatatctttattgacgaaagaaaaaagcattcatgaccggtctttgagacacgtgccgacatgagccgacgcgaaataccccttgttctcgactactccgcgatccttgatgactgccgtgtatttaaccacccattgtggctcgacatctccctggatgccgtcgttggcctcgggagaggaagccaagattcccgcaccactcttctcggtgggacccagcagttcccgcgtcgtgccgacaggaagaatatcatggcagtcgttatgggtgaggagttgaatgtgctcttgtttcgcatagagaatcaaatgtttaggaacgacacagcaatccttaagattgatctgatcgaccgatggcttgaccttggtgtgcggcaggaaccgggccaagcgttcgctgccgaactcagcaacgcccagctgggcgatcacgccctgctcgtgcagcgactctagcacgtgccatgtctgcaccatactgtcgaagtcgtccggttcaccgttgctcagctcgctgtcttcttcttcgctgtcgtcgtctgcgtcgaacaggatccccgggaatgagacgatcagtagatcgatagacttgacatgtagctccttcaataccagatcaattgcctctctggtgtgtgcgcaccgccttgataccgggatccccggtaggtagaatagtttcactgtgatatcatattggtcacggtcctctgacaggcctggctgtgagaagtcgatctcggggatatagaggccgtcctcggtttgtagcgcccatgaacgtggatgcgacacggattgaccatttgtgtcggtgccgttggccggtgacgtttcggtttgttgcgaggcgaggaagttcgatcgaagcgagttgattagctcaacgtttgatttctgcgtcagaggctggcgaatgacggattgccgcccagcttgcataatattcctatgagggttgagtgactgtgaccgaggcgcatcgaatgacaccacttacgaactagatagaatcagattcatgatggacgaacgagcgagatcttagatatagaagaagtattggaatctaatcatgagtgaaggaggatgaagatggtccgaaagttgaaagttgcaaattcaccccgcggagagcccctctcctacgggcctgacaaatccaacgttctccaaggttcctctactctacacttcacccatctaatctgcaattacttcaatccttgtcaacagtcggatcccagtccgtgggagaatactctcccgtatcaagcaatttcatatcctcagcctccaactcaaagtcaaagacatcgacattctcgcgaatgcgactcggcgtaacagacttggccagaggcacaaatccctgacaccagaaccattagcatcctgattctacatcatttactctctaggaaatcaatcctacttaccatctgcaaactccaccgaatcaaaacctgcgccggcgtcttcccatacttcttcccgatagacagcaacacaggctccttcaagcgactcccatgcgcaagaggcgagtacgcctcaacaacaatattcctcttcttcaaccactccacgatatccgaatgatccaaccacggatgcagctcatactgaccgacatcgatctggctagccccgctactctggatgtgcgcctccagttcgtcgaggtggtggataccgaagttagatacaccgatagatctcactttgcctgctccttgggcttcgactagtgcatcccaggaacccagacgggcttttttgccgccgtatggagcatggattagaatactgtatatgcaccggttagactgtagattccaattccatggggaatatccgtttctggattgtcgtggaggcttacaggtcaaagtagtcctgtgctgcttcttttaggctcgaatcaatggctcgcttggtagactcgtaccccattgattgcggcgggatcttggtcgtgaagaagacctgcgatcgatccagtttcgaattcagaattgcctttccgcaaggcccctcgttgtggtacatgatcgccgaatcgacctggaatctctttagtacggtcttcttgcgatcttcccggggagcgtacatggcggaatccagctttcagggcttcgagggtaaccttcgcggtctcggatgagggactatcgttggttaggagattcaggaggaagcattggttcaaacgtacatcatatagacctatattcatacaatgtcagctctgcttttgaaactcatctgtgtttgcggggtaactgactccgtatcctaagactgggatcccatgtcccgactgtagttgacgcgttgactggagagtcagctttgccatattgttgttaaattggatattcagaagacacaattcaacgttgtttgaagaggaacgatgaaatcatagagtagtcggtcatatatgccgcctatatctttaatgacgtatgacttcaataaccggattatctgtatctataagggacgattgatgtaagataacactctgatgtctttctaaatgtcatttttgtgattttttctctttacgttataaattctagaacggaggagactctaatagtaagaacaggtttattacatccaatgggctgtgcagcgcctcaccgaggttatatgaggcctacattcctcatacttttagccctaattccgacaatatctccaatcccagtcataagttgtagtgtaaagctctcaactcatattcacaagattacctattctggttagtactatgttggtctacaagcatcatccctgtcataatctgcccgctcttctacctccccccttccttcacgttagcttcccaatttccccgacgtccgacttctgacgtgttgccactgtcttcaatatgccaagcccggaaatagaggaatctgctcaagtcctagaatgtgaaccccagatgaacattcttttctcggctcccgacttcaccgtgccttccccggacaaggtcgatgaaatagtcaaccccgacaacattatctttaactagggcggcgtgaggatagccagaatatcacccgaaattgtcgtcgaattcggaacccatgtcacgttgaccgaggcgaaaaacatgatgtttgtgaaacaaaatacagaaacactaccagtgccggaaatcttcgcttgctacacttatggcccgatagaccgagatatcggagactacggtagcctatttgatacacatcttcatgactttcgtggaaggccagagtctcgataaagtttgggaatcttatgatgagaacacaaaagcccatgttaccaaccagctcaagcaatatatctgcgaacttcgcaatattcgacggcaactacataggctcgactgattccggccccattatggatccgatctttgagacttaccacgacaaaggttagcagcgactacaccaacatatatacgtgtgctaatacacatgtccaggaccctttaactccgaagaagcttttaataacgcaatcgtcgatgcctatcaatccaaggcaccaagatgtcacatcaagagtttcctatccggtatgttatgccaaaacaaacaccagatcaaattcatccacggagacctacgcctccagaataccatagtcaacgatggatctgtcagtgggattgtggattgggaatttagtggcttgtatcctgaatactgggaattttccaaagctctccatgtctagaggtggcaaaatgattggattgactacctagtacagattcttcgaccctattatgctgaatatgcggttcattcttttttgactcaaacattgtggtgatccaaattcttgggcagactacgtacggagtacggagtagcagtatccattcagaccaaaaagaacatttgcacttgctataatgttttgataaaagcaaaaacatgtattaaatgtcatgcatcacatgaacatttctaaaatccaacaacctctctatgtatgcagatacaaatcttcaaaccagccaactagttctttatttgcagctccttctgagcctctgcctccacttgttcttgcaacttacggtccgcctcgcgcttaagctggtcaggacgacgaagagcaatgtccttaggacggaagtcactgaacaggtgcttgagaacgttctcaatcaaccagcagccaccgtagtcgaagatcatcagcacggtcagagtcaccttgaactcattggtgaaggggacaaggcgcagcttctcattcagctcaggaatgaattcggtggcgcacgagaatgcaacacccgaggcggcgatgaggccccagtacatgcccttgttctcgcggattgactcgcggaaaggacggccttggtagttgatcgagaaagtggagatttgctggatcaactgcaaaaggtagatggcactgttcaggagggaaggctcgaactcgccctcgagatcaatattggaatctctcctatcggttgtgttagctatgaggtgggacaaatcagagggaggttcaacgtacggctcgtgcttatagacatagttggagaggtagatcagagtcacgatgtggatggcaaactgtccaagaacagatccaataatgtagacgttgaagatattcggctgcgggcgctccttagacagaccctcgacagacttcacattaaaacattagcaaagcaatttgtgaacgcggagaagtatgacataccttggcgcgggaaatagaaaggaagcagacactcatcagcataccgctgatggtgacctgtccatcaccgaacttaataccctccaagtagatgacactcagactgtacgcactgatcaagcagttcaaagcaagaatcttgtacatctgaatagtcgcaaccagggtgcaacgaccttgacgaaggatattcgggatagcaatgacgttggccaacttgctggtgaagggagcagcgactgatgcatcacccaacttgatagtcggaggttcgctttcatccagctcctgttccatcaaagaagacgtaagcttgtctgcaagtccagctgcggcggcctgagccttctgctgtttctgctgctggggggtcaagttcgatagctgcaaggcctgagcgccaggagatgtgatggttgggatagcctcgggggttccaccagcagcggtgatcgcggcacccttgcgctgcgactcccgctccatggctttctcgtagttagggttggaaggaccagggggatacaggtgagcgatttgaacagggactggaggggcaggctggttgaatctttgcatcatgctgacctgcttctcgtacagctccttcatcttagtggtccgatagtgttcagcgatcttagctaaatcgtctggcgagccgttcagaagcgcgacaccgacgtgagcctgcttcagagcgccaacatcgttggtgccatcaccgcacatcagagtggtgtatccagcgtccttaagaccaagaaggatgtcttccttttgcttaggagacacacgagcataaacccaggtgtgacggagcagaacagggagagcctgctggcccttgaactttgcgagagcatatccagtgatacagatgtccttagtcttcaggatctccgggtcgaggggcttagtggggtcgacgtcgatattgagcttatcatcaatggtgcgccagacaatcctggttccagagttgtcatgctcgggggcatcaaggatgagaacctcgcgatcaacaatctcaaccttgcgggcgacatggacagcagtcaatgggttatcaccagtgatcataacaacacggtggctgctctcatttagcatacggacagatttaatggcatcatccttcaagggacattgaaggacaaggaaaccggcaaaaattagctcggattcgatctcttcgcgaacgtagttgttcacgcggccctgggaaagttcggattcagatgaaagatacttgtaggcaagagccagcacacgggcaccattgcgggtgaagtgcttgtaggtttcctcgtagttgggaggtgtgttgaccagcatagtgttaatagtctccggggcacccttgacacccacgaatgtggacttgatcttcttggaagtcttgcggtcattggtcgtaatggtcgcgatggtactctggcgtttcagaaccgaggagaactggaatcttctcttgatttgaacagattcaacgttgcgaccggcaacaacgggggtgttgcccttggaagacagagtatcgttgtttcccagagtccagccaagccattccaatgtagccttttccatagggtcaccgacgacctcaccctcatccagcttgaccaatgcgtgagcactggcgagaacgagagtggtgttgggtccagcagcagagggattggccaattcagtctgagcaccatcagcttcaaccttcgaaccagcctcacctaaaccgagtccagcaataccatcaacgacaaggtcctctccagtcagggtaccggtcttgtcaaagcaagcgatgtcaacacgaccagcgaaagggatacggaaaggctcggtgcagaaaatggcatacttgctcaaagcagcaagactagtgtttacggccaagctcaattccataggcaattcgggaggaacaacactagtgatgatgaggacacagtcgagcagaagcttggagcgtttgcggtcctggatcacaccctcttgccacacgtaccacgaagcggcaattgcgaaaatcaggaggaagaggatgaacaacagagcttcaacattgttggcagagacacgttcagttgagtagatcatggttcggacgaggctaccctggctagtttcaaaaccggtcttaacaaccacacccaaagcaccattgtctgggggcatagtaacgttgttggacaagttcttcaagtccgagtcggcagtgagattagggtgagtaacttgaaggaccttggtacctccatgcacaaacgagagcttatccaatccttccggctcaatcaagtcaccgccaggacggagctggacagagtctttcagcagaggtgtgctctcgccagaaagcatagcctcgtttacaatgacactgccttcgaccagaagaatatcacacgcaacaccgctgtcctccttggtgcggttcactgacatgaggtcaccgggaagaagcttatcactagtgatctcttgccatttccgttcacgatacacccagacatcgtaaggcttaatgctcattccacggaactcgctcaaggtcctctggcgctgccacacaacggtactctcaaacataacgagcatgaagagcgtgaagagcgagtagtaccaatattcatccaacatccacaatccaacacagaaaatctggaagacgaagaacggcgcgacagcatgctcctggaagagttcaaggaaaccgggaaccgggatatcaaaggtgttatcgccatagtggttgtagacgcggtcaatctcggcctttgacgtgaagccctcgctcagctggaaagtctcgagggcgggctttggttcggcgtcaaggacataagacaagggtgcgaaggtgcgagtctcagggtaaaagagaaagcggcgcttctggaagagaaacgaaagtgtcttcttcgtgccggtgttctcattaatcaatttgcagatctcggcagagccagcgttagtgatgggaaccactttgataagccgggcagtatcgatggacttggctcgaatggtagtgaatagagtgttgatatcaatgttccacttggtcatcaaccaaaagagcgactggattgtgatgatagaccccgcgaacacgaaggtccattcctgtccctgaatgtatgtatcataacgctcgggggagaggtagaaggcgaagaacacgggccagatgattatgaaaggccagacgtatgtgtgtaattgccaagggatcgggttatgcaacgaagcagtatggatctgaggatcgtccacgagctttgccctgtatactgttagctgtagccgcaaagaatcggagggagcttctggtaacgtacatggtggcaatctagtgaccgcggtcagagtctaacaagctgaaaattaaagactcatacgaattccgaaagcaatgatagtatccaatcgaggaaatgcccagatttgttgatgaagccaccttccaccttacaatttttggttccagaggattcgccgctcgacgcgctatcattatgtcagcctgccccgaccgccataggcttatgtagcactttaccgctgctttctacaacagcccggccgggctagctcaatcggtagagcgtaagactcttaatcataaggctgcgggttcgacccccgcgttcggctattcctaaaaccaaacctgagatttctttttttgatcttttcatttgctcgtcgttattagtatgttaatatgtagggagtacaacgtatgaattttttttttgagggagggaatgtggaagatgatgtctgaatatagactttgtgaaaacgtatatgcttgcatcaagacatattaagggatcaacctcaatctaatatagagtacataatgtcccactgtcgttctctgcttcagtgtttagcatgtcgatatatataactcgttttgggcctttctagcttgctccatccgccttcttgtccatcacctcccgattcaactccttcaccattcccgtcaacattctaacctgctctttcagctccctgagttcatatgtacaattatcaagcttgatatccggcatggactccatgacctgctctttccaagtatcatcaagatcaaagttgacatctgtggccacatgctcccattcctgggcatattcatcgtctgcttcgccatggcgtcgattccattgaatctggcgtgcccgactggtctcaacccaggccgcaaagataagcagaggagaatagatcacacccattacaaattcattcagctttgcgtatgcgttccgcgaaagccaccattcgaatggggctattagaaacagaatctcaatgagattgaatgctagtatccagattaagttagccacacgtgtgccatcgaagcggaaaaaatacgtacgcgggatgaagacattttcatctggggcgcggatgaactgcatggttttctgcgcaaagatggccatgtattcgtcagtggcattgcccgagatatcttcatatgcgctgttgtacaaggcaatgagaatattcaacaaaactgataattgtcaacataagcccaaacaagctggacgcaaacttaccagtcatgacaatgaagttgaaaacataatagaggatgatgccaaagggaaatgcaaactcctggaaagtgtcgaactcaggactctgcatgatactgttcaccattccttggagaatgtttcggtgaaggggatagtcgtcatccacttgggccatgccgacgaaggcctggaagaaaccagccatcaccacaaatagaagagcaaagaatatcaagctctccttcatcatgacccggaggaccacaaacatagcaccgaagaagcggaccgagtcaaggtatagcatcatgcgcatccagaacatagggcccgcaaatgccaagaagttgtagctgagctcgttgtatagccgcctttgttcatcgttggcagatgttgagtgtgccaaggcaataaaccgcatggcaagtgacacgatcaggatagtgtagagggttgagttgaaggcattccagaattcgaggtaattccatccaaccttccaaaacttgagcccttcgtcgcagatgaacgcaacagtcataccgtaaagaatgccctcggccacgtccacgtcaccggttgggttcacggtattgatgaccgccgtataaaccgcaaggtaaaccaaggaaaacaaaatttggcagacattctgatacagaggagttcgcatccggtcaggatggaaatgaacccaatagttagtgttagccttctcgctgtattcgacaaagttagttgggttgccctcttcctgacagatccaacccctccacaggtacaggatacatctctggtacggggcagagctgatgattttcaaggcgtggagatctaccgatcgttcaatgacattggcgggatcagtctctactccttcactgaagatggagtaccgcttgagcaagatatccttcagcacgtaatcttggtccggctccgattcgattctgttcaaagtagtgagtaaataccagaaacccaaaaatatcaaagggatattacatgcgcttggcgatgacctcgcaagccactgcccgaacctcgtgaagatcggaatcccagagctcgacggaggcttgaatcttgaaccatcgcagacaaactaaaagacaataaacaacgcatgctttgtattcatctcccccagccttcatggctgtcgcaaccacatcgtccgtgatgatgcggctatttgggtcggtcaagaatttatccttcacttcgcatgagacaacctgctcaatttgatatttcaaccgaagagcaaccttggcaagttcctttgaagcaccagaggcgtgaggctcatcagcagcataggcaggtagcactgtgacttgttagcacattgcggtgccgattgtttagaaatgacgtacgtcgacgacgttccacctggatgcgatgccgcgtcctgccaggatcggcggtaaagagattcctccaatgtcccatatcgcgtagaatatgcaaaaataaatggccacaacaagagtgcaaagactagaaaggggagagttcggctcacggagtttctagcttgaggggccaccaatgatgatcggcggtagataaacttcagctccccgccaagtaatgggcactgggtctgaattcgtaaggaggcgaatgtatctctatatgttggtgaatatgtgtctttacaggtacaggggtacgaattgcatttaaaagcatgactggcattgaacgtctcggttgcatcgcaaacattatgtgcattagaacttgcaccctgttgtgcgaatccagcgtctttgacagacggtgggcacgagggtttcgaccgcaattggcatgcagcgcatgcacaggcgtggataaatcatccccagacccgaagttcaggcgactgcactggctaaagggcgagttctgactgtaatcctgcccattagcacattgagccatcgagcctttctccgatatgtgcaagcttttttctatccattttcgccaaactcccctctagcggcgatctccgctttgtattccagcgcatgaccgccgtatgcccctcgactcggagttatgacccataacttactcaggaacaccctcatcactttcagagtcttcatctccgctgacctgggtgttctcacgctcacgcttctccataagctcctgcaggatcgcatcgtcgtgctcagtgacagccttgggtgccatcttcacggtgcagctaccgccgttcgccttgatacgctcttcgattttcacaatagccgcctcgagcaactcaacgccgagggtcttgtcgagacattggctggccaggacgtagagaggaggagccaccagtctgaccttgatctggttctcgggggtgttgtcggcctcagcggtacggagggcatccttgacggcatcgattccatcgtagccgaagcaggtaacctcgatatcggcacggaccttggtaggatggggggtcagcttgctgctgatgtattgctgcagctcgctcttgacggcatcgctagggaaggtgatctcatcccagacgttggggttcctgaaaacaattgtcagaatttgatcatatcacgagacaaaaagcacgaaaacctacgtaatggagatcttgaaagcatcgtgcgcatgtccgtatttctggttcaaaggccacccgatgttctcgtatagggtctcgaggggggtctgggtcgcctcagcaacgtggcgcatgatagagtgcactgccttgctcttgttgtaacgttcctcgcacttgataacatcctcgggggagacacgtcgcttcgacagatcaatgtaacctttaagttgacaagttagttctcaggttcttcgaggcaaataatgtatccttgcctttctccttgtcgacacgaagcacgatgacgacctcgttgcgcccaatgcggatgagcttttggatactgcgaatacgtctgcgggagagttctgagaggaggatcatgccatcgatgttgtcgtattcaagcagcttcacgtatgcgcccatctcggcgatctagctcgttcacacaaatagtcagtccctgtcgctttgatctcttaggccattattcagtttattcatacctgcttgacattcaccatgacaaagctgtccacctccgggtacttgtcctcatagaaccgacaatttgttaaagacatcttggcggggttctgtttttttttcctcggggaaatcttaggtgcgaacaagacggatttgacggcacaatcgagagatcgatctagtggccaacagtatatgcgtgatcgtgaagtcggagatacaggagcgcagaagagagaggtaacgcgaatgaggcacaatctatctctttgtggcggacttcaaaacccacattgacctgatcggtcacgggactaaaaggcacgtggttatgtaattatctcaccgccttctgcacttggaagatttggtcctccgtatggtgctatgctcggtttatatcgtaaattgggtaactatttggctattgaaaagaaaaagcatcagcccaacaccagcctagcgatccttgtgcgcaatgctcatgctggttttctggttgctgtctagcttgcttataatttcccgcttcttttcttcatcaatctttttgggacgcttcttggtcttcatcttcccctgcccttggtgtggaactagtgactgagttgtttgaaggcttccttttggttcatcttgctgaacttgttcatataccgcagttggacgtcgggcttgtattcgcggttcaacacgccggctatataacgtactccctgctggtcacagcttactcctcacttcatcttctctgtcgattttcaaaatgatagtatcaatttgttcgattgcacggtttatgatagagtttacacggagtttttctcttccccgtggtgctttcggcttcgcttgcatgaatgcaagtgacaccactggtgaggtggcagttcgtgtataaactaaccagcccagccagttccagtggtgaatggtatcatcctcattgcaaattgcagcgcggtacttgaattcatcaagctctggtaggggactggctagctgtaaagtttgaactggctccgaggtctaggtggaatttgggacgctgacatgcgatgtgataaggtagaaaggtggtaccacatttaataatatataaatatacctgcagaagcataggcgtcaaattgttataagagaaacccgtatacagttcgtcacaagttatatagagtgaatatatcacctgaccatatctcttggctgacacatcagtcaattgcgtcaacggaaatcaagggcaagatgggcacattcggcactcgatgtccggcactcgatggcatccgacatttctacgaatcagggagtttcttttgattatgctgaccatgccttttcccttcattgcacagtcattctccgaggatctgcgttgaattaacgataacagtcctcgggttgctttccccgcttatcggttccttagcgccgttggcccttgccttaccgacacaaacagttcgggctggtcccaatttcgaattgccttagtctttgatctctatgaccagcatttatggcgggctgtttcgtgcttaactcttaaagataaaacacctctttccagatcatgtctgagacaggttcattactccctggggagtctgacggactcggacgtccgactctacgagaccgcattgtcgacgctttccgttcgtcacctccaaccggtcttgggatctcgacaaattcaagccatgataataacacggcacatgatagccaaactggtaccggggctccgagcgaaccagacgtgagaactcgacttctcgaatcatacctccagcccgatcctgtgtgcggcgaaaggcgctgcagccatggcacgttctcgccgcggatagaagatacaggaagagactcatacatcggggggccgggcgcatttggatataacggacatgaattggcggacggcgcggccggtcgccctagaggtatagtagatcacgagtcggtctcagattcagagactccacagttgaaatcatcgttcacttttccaataaacgagacgaataaacagtaggtcgtatcttactcttatactgcgagcactttcgtagcctgcctcaagattggtaactgacgaatcgatgacagatacatatcctattatattccttttttcaattggattggacaatatcattggtcattcctgcgcggagatctcatggctgcgttgaccgtggcatccatctacatcccgatggccctctctttggcctccaatcttgcacacgcaccacccatcagcggcctctactctttcgtgatccaccccttgatttatgccatcttgggaagctgccctctcttggtagttgggccggaggccgcaggttccttgctaacgggtgctattgtcaaagcaagtgtcatgcaaggaagctcgggcgaggacgaccctacagaaatcgctcttgttgtaggagtggccactgccttgtccggcgccatgatactcattgccggactgacccgcctaggattcttggacaatgtgctcagtcgaccattcttgaggggtttcatcactgccatcggctttgtgatttttgtggaccagcttatcccagaattgggtctggccgagcttgccaaagaaacccgtgttagccatggcactagtgttgaaaaactgattttcatctttcgatacgctcgagagtgccatggactaactgccatcgtttcgatcgtcagcttttctgtcatcatggtgttcaggtgcgtaccgtatccccgggtttatattcaccatactgatcctccgcagaactttgaaaaagatgcttgtgcctcgtattccccaagtgatttatttcccagaccgcttcctggttgttgccctgtcagcagttctggcttggcacctcgactgggaatctaaagggctcgaaattcttggacctacagaagtcggctctggaggactattcgctttcacttggcctttccagcttgcatatatgaagcatgtgcgcacagcattgagcaaatcctttattatcgcgctccttggcttctttgagtcatctgttgcggccaagggcctgggcggaggcagttctgatggtatcaagggaatgcacataagtgccaatcgtgagatggttgcactaggcgctgccaatgtcatcggaggctgtttctcggctttgcctgcttttggcggatacgggcgaagcaagcttagctcgcagacaggagcacggtcacctatgactagtgtttttctcagtatcatcacattcacatgtgtcatggtgcttttgccttatctctactacctcccggttcgtccctctcaaatatataccacacgtgtgcttttccaagtgctgaccacatgattttccaatagaaagcagtcctgtgctccatgatctccgtggtagccttcactcttgtggaagaatgcccgcatgacctaatcttcttcttccgcctgcggggctggtcagagcttgttctcatgttcctcatcttcacaacaacaatattctactccttagaactaggtatggcgatgggaatgggcctgtcagtgctaatcctcattcgacatgcaaccgccccccgcatccagatcctgggcaaggtcctcggcggcacaaccgcgcgtttcgacaacgccgagctccacccggaaaacgtggagctaatcgaaggcgccttgatcgtcaagatccccgagcccctgacctttgccaacacaggtgatctcaagaaccgtttgcgacgtctagaactctacggctctactcatgctcacccttccctgccgcgcatgcgtgctccggaacacaataaaaatatcattttcgatgttcatggcgttacgagtatcgacgggtccggtacacaggttctttcggaaatcgtacaagcgtacacagagcaacgcgtcagggtattcttctcccgtttgcccaataggagtgtgttccgcatgtttgagctgagtgggattgttgagacatgtggtggattgagtcatttcgtccctagtgttgatgaggcgctgcggttggcggaatctgagaaccagacacaggagatatagtgtgtctaccttgctggaattggtgacatgtgtttgggtacagtttggatatattgtacagacatattgctctcgatcatctaaaatataattaaactgttatactacttgacattttgtcaaggtgcaagttcaacacctatccatgagcaattacttattttccaataacgagccttgcttttcttgggtttaatgggaattgaaataaacccttcatgctttggtatgcaccatgatcaggagacctgatcgtgccattctggcgatgaaagcctcaattgcagcatccgcagtacgtatcagggtgatgaaccactaggtcaaaacatgactagcagctgcaatttagccgccccggtttgcacttagttgcaagtggtgtattggcgatgagtccagcggattgaattgaatagcttcaagaacaaagctattagcaccgtgaatccaggcagggcatactggtcggttcgcactcgcttcttccgagctcgaaagatattataacatgtcccagtttcacactggcacagaaaaacacccagaggctcacgtagccgaatgatcctccacaacagccttccggatcacctcgagcagaagcgcttccgccgcccccgaaacaagttcattactgtcgccttgaactcgagcgccctcatctccatccccatcctcatccccggcatccctatcagcagccacaaccagtttcacacgtccttcgccacccaaaacgaaagcagcacatgcaaccttcgatagtcgcacatgctgcttagcaacctggtccgaagacgacccatccagatccagcttcatggcaagatgcgtctccaggtacgaagtaagattggcgatgagaggactgcgcagtttatgctgaaggcgtgattccggcgccgactgtccagactgatcgcgcaggaagtccgctagtgaagcgcgcgtgatgctgacattgagggatctcagcgccggtgcgatagacggtgaaaaggagagcgtgagctgtaactctttgataatatcttcgactgtgtcgcttgtacttgtccgttgagtgcgcagggtgtcaacgtatgtctccagacccgcgcagataaagctcgacggcagtcggagtggcgagcagtaggtatcgaaattggtagataggaaggtgaggaatgtttgccggagcgcagttgggaatcgggttaggaggagagggagagatgtggatccggtgcgctgcgttggtggtgattttgtgtctgcgagcaaagctgctttgtagatgatgttttcatattctagtgttactagaattccaggaaatgtgatactctgtgatctgcttggcgcttcgtcgcgcgatggttgagaagagattggccgccatagacaattttttagggcgcctgttttagaaaacgcgtcgtcgtctgctgcaccagtgcttgtatgaataccagcgaggacatcgcctgtgagatggtctcgtagacgcgttgcatatgtttctaacgcgacctggttgtctaggagggctttatagtccttcccatgatggagagggaagagccggtggatggtccaagaagtgttgaacaactgtcgtttgtctgcttgttccatggcagccaacgcacgggtttgcaataaactcggctaattattatgctacaattgaagcatatcgtcgtcgaggaagattgatatttggatgtacagtgacgcgtgccggtgcaaacaaagcaaacatctatcaatttcctaactaccagtacgtcttttggcttcagaagagagaaataaaagagtgaaatggaatgcaaatgcaattagctgaaatgttcatctatccaactccaatatatgtccggtataaaaattaagaccccaggcgcctccaacactcaaattcaatgtatcatgcctgccatcctctcgtgggatgacaatccggacacccaaaaacaattggaataccattccagatccagacgtgctctacgttatggggtatcgctttccgggctttcaactcagcctcagcggctgcaaaccagatatcttgcactgaactatgcaggttctgcgcagacacgcgcgcaaaaacaaccgagtccataggatccttttcatacatcgtcgtgtcctgatagaagttgtacataaactctttgcgttgcgctcgctggctcccaccgtccccgatctcagcggagaaaaactcaacgatccgcacaaacggcgccaatgtgagcaacgagctaatccacgagtcatcaatgtcatgtccgtccaaagacatagcgtagcgtatatatgaaacaagcagatgcatgcaatggtgtgttgcaaccaacgccgccgtattggtgaagggagggctttggaggatccgggtttgtagctcgcggtacatcctctggcgtacctcgagcggtaatggtacagggagctggcctgcctcgtatttttgtacgagcatgttcgtgtgctcgcgccgggcggatgcatatgattcgaaaaaatagagtgtatagtacctggtagagaagaggtcagtgacttgctggggtgaagcaattctgcgctgtccttacatgagtggtgcaaggtggaaccatatgctagctatgccgcgttttacaagggcgttgcgctcgtttcgctttgcaggaaatgaggccttcatgacggccggttcagtctggatgaatcgatcgaggatccggtctgccaggtagtagcagagccttgagcagagcatttgccgtcgccgcagcccatgcaagtatttgaaggtataaagatggccgcccctggcgcttttggatggtgggaatagatccgataacagcacgacatcgtcaccggggtttcgagtatagattcgatcattgtcgatcggggatggaagggtaccgtggcgacgcaatcggagatactgccggacaatctcatgctcgttgctggtgagcagttggcaaaaagccttgcatacgagtctcagcggatggaagtctgtgatgccggagtatgcgaatatgcggatttgaatctcgacggggaggtcccatggcgagggtagtggaggatctgtaggatcctttctaacagcgaggtgagtcagtgaaattcgcggcttgtcgcaaaagatctcaccttaaagttgatccacgatggtccttggcacccacctttctcctgttgtggatcgcagcccgtactttctgaacggagagggcgaatttggcaaagccactcattcttgggccctgcagcacatgaattgactggctcccaacgagaagcgcactttaccggggctcatggagataaaacaggttcattgaagggggcaatcttaggctaggttccataaatagcacatgactaagcccctcgatggtccaccctcgagggctgggcactccgtccgatcaaatgtattgaaagacaactacggagtgattgtagcatccaagggcaaattaaatgctgttatttctagtagaacatgataagcttggctctgtcgaatacgagcaactagaccaaggtagtcaaacaaacatgcaaggagcaagatgaatgaatcatggttccacttagatgcaggcaatggtctgatatgaacatgacatagacagtagtcaagcttgatatatagactatgcaagctgcgtcgtacagaacaaactgcccagatggttcgatggaatccttacgagtttatataggcctgggcatacgtcattgcgtcaatggcgtgcccaacatatatataaagacctccctaaccccataccttaagcatatcactccaactcacaaaatggtcgacaacatcctcattctaggtgccactcggggactaggtgcctctctgcggacactgtactccgcaaagccaggaacccatgtgtttgcaacctctcgatcttccaacccagagccaagctcaggtgtcacctggctgaccggaattgatatctcccagccagatgtggggcaaaagcttgtttcgcagcttccatctacaaagctatcgacagtcatcattagcgctggttactttggctttgaaacattcgattctccagactgggagaaggaggttcagatgtatacgacttctgccattggtcccgtctttgtggtacacaatcttgtcaaagccggattgttggaccagggcagtaaagtcattctcgtcagcagcgagagtggcagcatcacattgcgccacgagaaagaaggcgggggtaactttggccaccatgctagtaaggctgctttgaatatggtcggcaagctcctaagtttggacttgaagccaaagggaattgcagttggtctggtacatcctggattcatgcggacggagatgacgaagagcgttggatttgataagtactgggatgcaggtggaggtgagtgaccattttacaggccttatgacaaggcttcgggaacttgttaggtctaatgtctgacctatatctcttggaaaacagccgtgacaccagatcaagcagcgaaaacgcttgcatctttcatcgaagattttgatcttagcaagaccggagaatactgggcgccagcaggaccagggtaagaaatttgattgtctattatataaacccaggctaatctatcatgtcagagatatcggcaccgcagaagttgttcttgggaagaacctgccgactcctttgcaacttccgtggtagagagtgaaatgatgaatatgagctaccagagccacgagtctacttcttgctcaaacccaagtacctatactaggcaccaaatttagagtaggcatttcaatccgatacccccggtctcgcacacataaacaccaaatccctccccatgtcctttcgttcttcatgcccaatgactttcacaccaagaatattcgcgtagaaagcctgcgtgcgctcatcatccgtcatcaacataatccgacgtagataaggcatgttttccttggaaaatgtttccgcaacacaaccgataagccatttcccaagtccttggccttggtactcagggagaacgtaagtatccgacagataagcaaatgtacaaccatctgtgatggtatgagaaagcccaatctgctcagtgttctccggagatggggtggtagcatcattcacaggttgggtccacctgtacacgccgaagcacaaggagccgtagagcatctgccacagcaccttctctgggatgggctcgttgacccagtaaatgaagtctctgttgagtgcggcattgactgctttgacagagagtaactttggatcggttgagatgaagaattcgcggttggtatctcgtgtccatgtcttaggtgggagtacacttgttggcggggtagaggacatggtgaatgtggggtgctgtatgctgggtgcgtgctggattgtcttcgagaaatgcaaatttatatgcagttggacttcaagaaatggatggtatcttgagatgagttcgttgtatggttataggcgaagagattgtagtctgtctggttatcgtgagtcatgcgctaaaactgcacttggcattacctcaatcaatactctgtacatgagtctgacaagaacgactatatcgcgacctgccgacaaatccaaaaatgaaaagctggccgatagctcttcatttgtagttgatatcggtggaaaactggggttgatattcctcttaagtatccggagatcgctgctgtatcactgtaggatcttccgagattgctcaggtgaagctgattgccaatgcgcaagttgataagagcaagttgataaaaagatgacggctatgttcgtgatgtgtaagaacagcgccggtgtagtcactcgagagactcgggtatgttttacacctggggagtcatccatactttaggcacgtggttcttcacgactgcctaataaggctaagcaacctgataaacaccaaaacgcaatggtcaagggctactccgagctttaatttatatagttccgccaatagaagcatagttgggctgcaatggagatgatgtcgctgttcacacgaatttgtcatttactgtagttgtgacagtgctgtatccttgctgtagtagataatgatctgtactacggagtactccgtgcaatcctttgatatgcaaccttggaaacatccacgatattaattcgtctcttccagaacttcaccgtttaaataccttggcattcaactcgaatcggccgagacaaatggcgacatttcaatttccaacctcgataccccaacttgtactccaaccatggcactccgcaatggcgtggggagtggagaggatggtgttcacgatagcccccctcggcacgccatctggaaccgcgatggtgttagcgacatcaaatcagtcccgagaacatcacaattatagccgcataaccgactgcaatcgtcccatatgaagccaattatcagattcgatgcgctggattgcaattcgcattatgtggcgtgtaaaacgttgcgcatgacgtgcaggtgggggtgaatctacaagaatgccgggatatccaactatgcgacagcggttacatgtttgtgctgtgattgttttactccagagaaaagataaacggataagcccatcatgactctcgtacaagtgcccgtggctctttcctcaaatatcgaacctgtctcggaatcgatcaagggtccttcagaccgcaatggatcgaccactgtaacggtgaatagtgatatcaccggattatcagagaagcttgagaagatccgatttgaactggaggagcacccggttgatgtggtgcgacccatcaaggtcggtattatcggcgcgggtctggcaggaattaccgcgggcatattgctccctgcgaagctaccgggactggatcttcgaatctatgataagaatgccgatgtggtatgttaatgtccattgatgagttgttcgacgttaacattctttagggaggcacttggtttgagaatacatatcccggtgttcgctgcgatatccctgcacatgtataccaatccagcatctcgccaaatacccaatggacggaagaattcgctcagggagatgagatcagacaatactggcagggtgttgcacggaagcacaatgtgtaccagtaccttcgcgcgggacaaaaagtgcagaaggccgaatggctgccggagaaagggaaatggaaggtcactgttgagcatgtagatggctccaaggtaagaaatagttattgttaatctgaacgttctatgcttacatccatgcacagatctatgaggaagagctggacgtgttaatcaacgccatcggtcatttcaatgcctggaagctacccgactatgaagggatcaacaattacaagggaaagctcttccattcctcaaactgggatccaactaccgacctgaagggcaagcgaattgctcttatcggaaatggcgcttccggcttgcaggttctaccctctattcaaccatttgccaaccacgttgatcactacgctcggaatccaacttggatcgcagattcattcagcagcggaaacgttggaatccgtcgactggagccaaattcgttctccgaaacacagctagagacatggaaagatcccaaggcgtatcttgaataccgcagggataccgagaagggatatttccagcgctttggagcaatcttcaaagacacacctgagaacaacgaactgcgcgagaaatggaccgccctgatgctgaagcgtatcgcaaacaagcccgaattggcagataagatcatccccgacttccccccggcgtgtcgtcgcccaacaccaggccccggatatctagaggccctatcccaagacaacgtcgactacatccagacacgcatcaaacgattcaccgagaagggcattgtgaccgaagacggggtggagcgcgaagtggacatcacgatctgcgcaacaggggccaacgtcgaccacgcacccccgttctccatcatcgccgacggagtcgacctaaagacagcctggaaacacgatggcaaattcggattcccttactcatacctcggcttcgcaacacccgggttcccgaacctcctctggctcggcgggccatacgcctctggacacagcggcacagtgcccaacaccatcgagaaccaagtgacatacatcgcgaaggtgctgcgcaagatccgctcgcagggaatcaagaccatcgtcccgtccgcccaggcgaccgatgacttcgtcgagtactgcgaccggttctacccgcgcactgtctggtcggcgaactgtagctcgtggtacaacggtggcaagcccgggtctcgtatccacggtctcttccccggtagtgcgtcgcattcgaattatattcgtcgggatccgcgctgggaggattgggagtatacctatgttaacccgagtgggaatcggtttgcttactttggtaatggctggactacgaaagagttggctcctgatgcggagctaacgcctcatctgagattgcctgaggagattgatttgaaatctcacatggagggatggtgggatgtttgatttggtatggagttcgttagactggatcattccaatgcaagagtgttagtgtctatttggatatacctatacatgaattagcgctgggcaatactattttttttcccctatttgttgagactgttctgataggacctgctccctgccttgtttagtcttcttctcaacacagtactacccgtggtttcctttatcatcactatttatgctcagtatagatttgatatgaagatgaagccatatgatattctattaacaagggctagcaacaattttttatttgttctaatgcagatattctacttagattcctccaatgaataaggaggcacctcctggcccgctttccagaagtatttcgcacccgggtgcgcatcagggagtctggactgacccttctttccgtacatgttctcacggaaagttccacccttgacagcgtagtccgaccagaatagaccacggcgctgcaactccggcagaagtagacgaataacatcgtcaaaggtatcagggagactagcatagctgaagttgaaaccgtcaacatcacccacagtcacccatcgctccagctcatcagccaccgtcttcacactgccaatgatcttgacaccattaccaccgagcaccaagtactcagcaatagtcttcttatcccacttctggccctcagtgccaggcaccgtactagcccagtggttcaccatactgcgaacagcaggaagctccacgaaacggaagtcctggtcatcagagtaggtagacagatcgtaaccagtccagccaccgaagagagcaagcgcgccctcccgatcaccgtatgtcttcagctcctcgaacttagcatacgcctcctcgtcggtctcagcaacaatcaccaaggcaccggcaataaccttgatatcctgcgggttgcgtccgagctcggcggcctgctggcggatactatcaacggaaggacgaaccagctccggcttctgcgcatgcaagaacacagcctcggcatgtttggcggcaaacgccttacccgcggtcgacgtaccagcctgcaagataaacggcgtgcgctggggactgggctcacagagatgagggccgggaacctggaagtactttcccttgtgattgatctcacggacagccttggggtccgcgtaggcctgggtcttgctctgggtgccctgcttccaggtcacggcgtcgtctcgccaggacgcctcccacagcttgtaggtgacgtctaggtactcgtctgcgatgcggtagcgctcgtcgtgctcgacctgtgtgtccaggccgaaattgcgagccgcggagtcgaggtacgaggtgacgatgttccagccgatgcggccgttgctgaggtggtcgactgtggagaagcgtcttgccagcgcgtagggggagtcgtatgttgttgaggctgttacgccgaagctgattgattctgtggctgcggccatggcgggcacgctgtagagggggtcgttgatggggaattgggcggcggcggggattgtcggagtgaggttggaggggcctcggtatacatcgtagcctccgaggacgtctgcgaagaagatggcgtggaatttggcatcttcgagcttcttggctagggcaatccagtgcttaatgttcttgtagtccgcgccttggtctgcggggtgacggaatagacctgggttgagatgactcggcgagtgcatcgcaaaggcattgatgatgagttgcttcttttcggaagacatggtgatggtgagggtggtgtttgacttgggatgattgaattgagttgaattgaattgaattgaattaattgagtctacaacagctctagaggggtagattatatttattgtccctgcacgtgttccgtatctgccaaccccgcggtgcattgtcgtgagacgtgcaaaaagacgtgcagttggaggccgatggcgtcagcatgtaaatgtggggtgatacgtaaattgctaaaagggttgggattccaaggttctcatggattggattggatcggatttgatattgaaattcgtaacatgtgttgtgctctctacgtttatcttctctcgaccgagtgaagtatggcgcgatgttatcccaatcaggaatgagggatttctcttcctttcatttctatacttgctccctttttaggtgggactatattcatacttggcattgatcatggtgaaatggtcaattgtattcaccctcccaatcgttgttctacattgaacttgatgctcaattgagcagtggtataactatattcggggttggtttaacctagtcgttacccgatttggtcgattttcgatccatactacttcttatatagaatacaagccccaagacaagaaaaagtacgtatccattgttattcagtctatctatatttaaaaaaatatacaaaaggataattgtaacatcttctaaccgtcatactaaaagcaaaaaaaaacaaaaaatgagtgcatcatccgtgaatcgaacacgggcctcgtcgatggcaacgacgaattctaccactagaccaatgatgctagttcatataagagggcttactatttcatatcaagtagtttatgacggtgctgcttgttaagcgagccctagacactgcctcactgagtcttggggccaagccaagcacatggggccaaagatctcttgacccgagcttccgatgtctcgtattcgctctcgctttcgggagggttccaaggttctgacagctcgtgtggtggggaatataaagttcacggcatggctgtgggatccgccttgcgccctggaccattaacccgtagtctcaatatcgacatacctgtaattgccatagttgctatctgcgaaaggcaaagggggcatcgtggctttttctaatcctggggtgtcatgtcggccacagcggatctagagctaccaaactgtcaacaaagattagtgcatgtaaatagcaagggcgaaatatatttttgggtattataccaagcccggcatgtctgcgattgttgaacgctcccatgaggtggaagcagcttcattgacggtatgagctgagtgttgaatgacctttccatcccttcgatattccattgggtccaggattcaaatattctgggatgaaactctgcagaggcctagtctaccatataaatcctaccatctggttgccagataatattcctggtgcaatatgcaatgccaaagcactaggtctttccctcgcctggaaacaatctgctgttaaaccatcgtcaaagctcaattgagtcttccgtctcaggctagagaatccctaagatagccccccgccaaggtttcccggatgatttgcagtgagtgtgctcaagtaatcgagcacttgcgctacttttgctatcagatgagaatcattaaaagggcctttcacatggcccttaacgtatcccataacgatatatagccacgcccgatcggtagagaaacgatggatacgcgggacgcgggatagtatgatcattgagttcgtaggtttttgataatcagcctcgtcttcactgagccttgtccaaatttgataacgatatcattcgaaatccaataagattccctgcttggcgcccgcggacaattcgatcaagagccttattgatccacagtccgaaaaggtagttgagtccatttctcccaaaaaagggtgatcgtatgaagttcaaagcggcagagtttctgactgtgactcgggcggtcggttttagctacacgaggaggttcgagcactatgacgacgcccagacatgcccagacatgcccgatcagaatgtgcaatgtcggcgatgcgacgcaggattcgaggaatgggaatggaagattaccttacatttactgctacaatatatggcttccaacctttgaagctatagccattgccaccttgataccctacaatatggatatcaactagttcgcgccgcaaacagccatgacgatcctagctctcattcggccccctcatgaccagcgcccgacaagactcagccatggcaagagggaggcttagaaccgcttatccaatcatatccagtcctgtgggcattgcccaagtgaagacatggtctcactgcggggaagcgcagggaggttgtgttgtttaccttttgactttcgaacatttaaaaccttacgacttccccccttcttcatcccttctaaatcaaatctctacctttgaacatccaaatccaaaggtccacaacactgccataatatttgaaccatgtctgcaaacggcgcaaacaccggcaaggctcccgcccccaatcatggtcatggagcacatcaacctctggtcaatgttcagccatttcatatgagcgatctgcagcccaaatacgcgcatcaaatcgatcatgaggatgataaccccgatgcgcatggctggtatgccggtttgagtgagttacaccaatactgtatgcgctgcgactctcttcctaaccatgtattcctcgtttagtccacggcctgggtgaatgtatcggattctttggagctattccctgctgcatctgctgcccgaaccccttcaagtcagtcgaccagggtgcggtcggtttgatctcgcgattcggacggtaagtgatcccctctccgccatgcctccgaatatcacttactgacaatgattaattctagcttcgaacgatcggtcgatcctggtctggtcaagatcaacccgcttagcgaacatatcaccacggtcgatgtcaaaattcaaatcgtcgaggtgccgcgccaagtctgcatgaccaaggacaacgtgaccctcaacctgacctccgtcatctactaccaagtagtctctccccacaagaccgcgttcggtatctcgaacgtgcgacaggccctgatcgagcgcacccagaccacactacgccacgtgatcggcgcgcgtgtgttgcaagacgtgatcgagcgtcgcgaggagatcgctcagtcgacttcggagatcatcgaggaggtcgcagccgggtggggagtgaaggtcgagtcgatgctgatcaaggacataatcttcagcaacgacctgcaagactctctctcgatggcggctcagtcgaagcgtatcggtgagagcaaggtcattgctgcgcgcgccgaggtcgaatccgccaagttgatgcgccaggctgccgacatcctgtcctccgctccggctatgcagatccgctacctcgaggcgatgcaggccatggctaagaccgccaatagcaaggttatattccttcctggccctggccagcccgggcagacgcagcttagcactgccgagaactttggcgaaggtcctagcaagtacggcactatctcccaggacgataatggactccagcatgcagtgaacgctcgcgttgtcgaggacatctagatgcgatcttgatgcgttttcctgcgtcgtctcgttctccttttatttaattggtcagtctcttgcgtgaaggcatgacccttttaccctttccggaaggtggatcatttgaagctgttcctcgacagctcattcgtctatgctccctggattttcttatttctgtattatggctggacgtgactggatccatgacgatacccaccttcgtttgcgctactatcgcagctgctttaatgtctctttaatgcccctatgactgctttatcataattatttcgtctaatgcaatgcagcaatgcaattcttgctatatgtttctttctttcaatcgcacctaatataccaggaccagtcagtcggcagcgataaggcacgtataaaaacgcgtctcacatgatagtagatgcgccacctttgaatcatttaaaataactgccggtagaaaggctgaaagggtttaaatcactgaaatccacttatgaaccttgatattctcgattatgtacatattccgcacccctaactcgatcagatgttttgcgcagatggcgttcccgatgaggctcagttacagccaagacatggcatcttccagagttgctattattgcaacagtctgattcctagaacagcggtgaggggatctataggatttgttcggatgtagtttgatttggtttgtgtatgatattgacttcttactcccaactaccctctaccttccaatctcattcgatcaactatatacttaggtagtaccccgaacactaagaaccctggactctccccagagtctgatcctatcccgatcccgatcctcaaaataatctactactggttcatcttagcccggatataaaatccagagccgctccttgccaagtgtggatagtccatagtcccgaggcttagcggaggattgcggattttctggaataggtatgaatgccggtagacaagcgatgaggcgcttctatatgtaccaggaaaacacgcggggcgatagccgaaattaacactggttgaagtggacgggataatttactcggaatatgattaaccaccgacttccgcataagcagttaattaagatcatgactgatatcacggcttgttcaattcctatgtaagatgttaggtgagtactgcatataaccaggaaagaaccaagctccagaaatgtacaacataaagtgtacaattcactgaagacttttatatgaaggatcctcgctagttagttacacttgtaagaatgtggtattatataacacgaggaatagagtttttttccaggcgagtgaggctccactaggagcgttgtaaccgacagcatgggacgcctaaatttacgtatcagacaatctatgatcctagacagcacattcgattattattgccgacagtattaccccctgacagaaggctttttcgtctccgtaccaataaggacccgagtgttatgcaagataatgtgccgaggcatacttactgttgagtccttggatggactgttcgccaaatggagtagtttattttcgcgtaatttaaatctaattaaatggggttagcgctagataaagggctagaataagccctggatgatcccggtatataacatagggatcagaacacgctgtagagtaagcactgtgaagttactcttgcggtataggatgcagtatactgaagggattcctaacatataccctgtactaagacttgcaattgaaagtcgagaattgaagttgaaccctagtttttttctaaaattaaatgaaatttatcggtaagaataccagattaataccacgctaactatgcactaaaatatatgatgggcgaatcccaagatagactgttgtagattgggtagagaaacgtgctgtaaaggcgctaagcatgtgagtggacattgccgatacagacttgggaattttccgtgggtgatattttctagtttacttctttattgacaaatgtaaatgttctatgttcaagtgattcactgactcaatttccgaaagaaatagaaaataagtccaaagtttggccaggtttgaggcagggtgacgggaaactaaccctggaggctgagggaggatatagagtcagcactaggatatatcgagaggagctaagatcaattcggatatggcactgcaggtataaataaccaaaataaaccccctttcgatccattcggaggctgataattttcgttttcccgctatacattctactctttcgcaacactctgtagagctacctagcagatacaacttccaaatgacgtctactataccaggattagttgcaagggcaacagcagattcagatctcacgacgacggccatgtcaagtatcttcactgcccccgcctcatgctcggagtcgtggacattcgaaccagaggttgcaaacagtgtccaaaatggtctcctactgcaaaatgccgcggcgagcgacaatgctgatccggcgtgtttcccttctggatacaatcattatggaagagttcaagcatctcttgtctatagcccaggctattgtccaggtggatacacctcagccgagttagcggctcaaagttcgacaaccgctgccatctgctgtccctcgtaagtgaaaaacagcagatcctggttcccggcttaaatattaacttcgaggctctagtgccttctcctactacgaggaagcaagaggcgactctgagacattcgccggatgcctaagtcgtcttcctagtggatcaagtaccagtgtcaccgtccgccagaactcgacgagcacagaagtcagcggccccatcacgatgtgggcacaagcaatccaaatcgagctgcaagcttcggacctaagcctatttgtctccgccactacgacacccaccactacaacaacatcatccgacacctcatcagttccgaccagcagcgcaaccgcttcatcaacaccgaccagctcaacagccccaagcacggggtctagcggcatgtcgacaggagcaaagattggtgttggcgtcggtgtcggcgcaggaggtctcattatacttgtcgctctggtattctggctcttccgccggcgtcagaacaaccaaaagaagactctagcagatgcaccatcgtcattcggagggagccgcaccgcacctagcgagcttggtgcggacggtttcggtgcaagcccatcataccaacgcgggggatacgtaacaccaagcgagcttgggagcgagccggcgggatcaactagcaagaacgcgaacactactccttctgaactatacgcggcaccccccggtccaaagttcgtacatgaacttggtgcttagtttttttttttttttttcttttcttttgttctttcttttgttttcttgatttgcaaagtcagaattataccccctttctcgctcggctctcggcccctggcataagtctatggaactgggacatgaatggttttacgtgaatatgcgcatgctatttccattgaatactggagtcgatgagcggcggtatgaggatcttggcttgggcttatcaagtattatgccagtacatatacatggatggtctccctgcattatggggcttgtttggggacccatgatgtaaccactatacctcagctacatagttaatacattataatcaccattgcttattttctagtttttgtcttgaatgcttttagggatgagctagtgacctggaaattaaattagtgaacaaattacggagtaaagacatgtagagataactatttgatctcttttgtttacgctgtatagatctcagaccaaaagcggccatgagctatacctaaaatgggatgacaccatacctaataaggaaaagagaaggcggtggggcgtggagatatcgatccccgcggaggccagctctctcttcaaatgtgaattgacctggacataaattgccaaagctcctaagtcagagctccacacagatggcatcgcaaacatacagctcgtccgttcgagctggcctcaaaccatcaaaccccgctccccccaacttcgccgatccaaacttcgacccggccgagttcctcaatgactccctatcaccgcttactgtggcatcagcacaacctagcgcctctcggtcacccggatctgttcccctgacagagttatctgcgcaggtccaatccctcctctcccagattagcgcccaaaatatccgtctctcgagcacgttatcccaacttaccgacgaaatccttcgaagcggtggacgactggcctacgaagttgaagtcctacgaggcgagacaatcgggctatccgaaaccctaactgaagtcttacgcgacgatataacaaagttcgtcccggggccctcaccagaagacggacgcaaggccgaacaagaagaggatgctcccacgaacgaagatgagtcggcagaaacagaggacaagaacaaacccgccgccccaacagacccagaatacataacgaacctccgcacactgaaccaagtgagatcgcgcctagaagacgtcgtacagaccttcggcgacgcaatgagctggccgctgcccccatccgagatctcattctcgtcatccttcatctccgtctcaggaccagacctcggccccgaaggccaagaccgcgaggaaaagggccaagaaatgatgaagaagctacgcgcagaagtgactgagctactcgacagtgaaggcggaggatacgccggactggatgctgccaatcgccgcgttgaagccctacggacgctggcgattgtgtggaatgcatcggccgaggaaaaagcccgtaatcggttcgtggatagcctggcgaatatcgtggaggaccgacggcgcaccttggaccagcagcaggcagatcagaaccagcgaggccagtccaagtccagatttgaggctcggcgggatagtgacagtggggcaccggctggtgggctgtttcggaatttacagcgtttgagagaggaaatatatttggagtgaaagaatgggttgttcatatatggtcctgggtgtctgttgagctggttctctacattgatacttggtcttcgctgtatagtattttgcatcttttacgacaatcttgcattttctggtctccataactccctgtctgtatatggctgtttgcactgctctttgcgggatcgccttccatatccgtcgagttaaagttgacgcaggtcattacgtagtcgtgaccagcctcgatatacataaactcgaccttttggataggagcgacgtcagttgctgttatgaacttagggctattaactacactatggggttgagcgtaactgaagggaatatagtccacagactatacagatccttcgggaacatctatatacagagtagatgtagaaatatacagttatccaagacccatgaacgtctaatttaggtgaatgtgttccttacacgtggagacacacaatactattattctcatagccctagatatggttatgaatcatcatctacctgagggtccaaaggcccaccaggtgacgagctgacgaagtgacgggagtggcaccgggaacgttgcgccgatcgcagcctctctccctctcctccaaggtgattgcgtatgcggttcctgacctcttacaatgttccatattgctttacccagtatctgattcgacttatttttgcatgatggcgtcggaggacgcgccactacactttgaagataccaagtcgactccaatgctgtggcacgtcttccaccgtcggtcacgggcaaatcttaaaacaattggtttgtcggtgattgcattgttcttcttctttcttctgctccagtcttctccaacggtaaggattgctttctgctacacggacatactattgccagacctatgacaaagaagctgacctgcctagcgagttgaaccggacttttggacaaagtttccctctcgccatccttttccccagcgcccggaggatgcccaggtcatcctgaatcctcgtaccgatattaatgttaacgatacccttccccacgatctggacaaacccaacccgcgcttgcatgtcctagttccagcctcgcagggctcgcgcggagtttgccgaacgctcacgtcggctatgatccttggatacccaccgccgacattaatcggttacgaccatcaatctcccggagcgactgaggccgagcgcatggtggaccggatcacgcgcgcgcgcaactacctccgagacagcaagaccgtacacgaccgcgactttgtgctgatagtggatggcgcagacacctttttccaattgccgccgaaggtcctagtggagcggttccaggctatcataagggcgaacaaccgaaagctgcgggacaagtttggattcgcaaaagtggagggccaaaatgctggggctgcgcctgagatggtacagaaatacacccagcgcgttatttttggtgcaagcaagatatgctaccccgggttgctggacgaccccggctgtgcatccgtgcccgattcatctctacccccggatgtgtatggctggaagactgatgcctacccggatggatccctgaaccgaccccggtggttgaatcccggagcggtcattggtcaggctgcggacttgcgtctgatctacgatgaggtcctgcggcttgttgagatgcgcacgaacaagtctggagatcacatggccttgacacagatgtacggacggcaagaggtgatcagagaactggagcggcggcgaagagccaatgacttcaaagagttgctttaccggatggtaggcatctctgatgcagcaaatatcaccgggattacccttcggctggagacaggtcaccgttacgagtacggcattggcgtcgactacgagtcacaactcttcttcaaccagatcatgtcccgcaaggacgtcgagtgggtcaagtttggcaacattaccaagatgtccgcgttgcagatggaacatggcgtcccgcgcgaacaccgtatcctcctaccgcaggacattgcatcgctcccgaacccattcatccagtcgcgcttcgcaaaagaatcaacccagcgcccagtgtggaatgccacactagacaagctcccgaacccgcgcgagcgcaactggcacaatatttcgctaatgacgaatgtccactccgcctcggtcccggtaatcgcccgtctcaacggtgaccccaagctccgcaacgcctggtgggagaatatgtggtttttcccatggggacgcgcgctgctgcggaagtatgtccgcgactcacacggattcgatgcggcgcagtcgtcgctgctgggcgggcaggactggttggaggtgcgcggaggtcgaggtgggatctggaccgatgatgagaactgggtcaatctttctgagatgtgcaatggccaagaaagagatctctttgacgatgatctcgggccctggggtaaggaaaacggtgacccagatcatccggtttacaaccagtatggaagtctcattgctgggaaggaacaataactcgactaaagctggactttgagttattatccttcccttttactcactacattattctcgatggatcgatgggctgccgggttgttaagacttcccgttcagctcgccgtccggtggtcaccatccgcctgctctgcgctatacctccacatcgagtttcaagcttatcaggctctggactttaacgagttttggagtaaagatatcttttgtctttttcatgaccgcctgattgggtgagccactattcatgacctccttcgggatgacatggccggattcaccggagaattcggacttattcttatgtcgaagctgggattctttcgactgttatcacgaatagctgtacattaatgcgactggctttgcatgactgcgacgcaagagtctgttgtatgataccgtcatagatgggaccttggaaagggccggctgtttggtgatgctggtgtatatagaaagcaacagaatgaacaagtaaagtattgtcgttcgcatctggactaatcactcatgtaatatctccaccggtttagatacttgatcatttcacagaatcttgaaacggccagagcttttcccatatcgctctctcttcttcatttgctgactcccgagtcagaaaagctgatcacctgttaaactgacaggtgatcggcttttcgtcaacggcggggagtggtgagcctgcgatgcggaatatcctatattatatcaagacggtcaccctttctataacttccttcatactcacgcgaagaatcattattaaattagcgcactcttctaccatttcttaggtcagtagagagtaagcattacatagtatagctatctaacttattctcaaaatccgaatctaacgttaaattaggagggtgccatagagcaagcggcaccgtcaagtttacacgcatcattactacccgtctactatccactcatgtgcctaatagatatttgactgaaagtatgaccctcactgtcagatataccatcttgctcatagtcttccggtttacatcggtgttcagcttgaaatagcaaccagtaccgcagaccttccgctgtcttccacgtggaatacggaatccgcttttttgggatcgtcactacgatcagaagcggacaggatcgaggcgtgcctatgaaagtaggcaagttttccgacgatctcctggagatgattttgatagttcaagtccagtcgggaccactaatagaaggcgagaataagcatgcatcttatcgtaactggtggatgtctgctcacttcgctttctccattgagttgaagaaaatgaaattggctgttgtcggtagaaagaccgaaaactgaagagtcaagcttaccctcagcccgacgttgcgtatgaatcatgcctgaataaagggttagttacgatggcagacatgacgagaaatcacttactcatatacgcaagagtctggcgcacgccgtcagcagattggccatgctctgtttcgaggatgaccatgttgatggccacgctttctttccctttcttcgcgtccgggccataccaaagaaaccaatcaggggtcccttggaggcaatgcactacttcattgtagacaattgggccgaatagaaatgggcacttggatgagatggggattggggttgaattaggagactctgggtccgggggcgtagcatggacagcatcaagtagaatacctaggcgaattttcacagccatctcaggtcttccatctgatctagaaatggcagcgtcgatcattttcaggacgatttctagacattaatagctatcttgccaagcgtttttcaatttggacttactgcagtggtctgcaagctcaaatggagcccgaagctgtgcccagtccgtgttatctgccctggtgaggtggaagatgcgctcaacatccgggaatgagaggacttcgactgaaagtttaggataccgaagtacctcttgtgtcgttatagacgccatgtcagaaaacagaagggtggtgtcctaagaatggcagaggtaacacaatgaccgtgatttactgctgtgggagaagtgagagagaagtgagagagaagtgagagagaagtgagaggagaaaaaagtgcgaggggagaaaagagcgagaagagagaacgcaaacatgaggtagtggcctaccagtaagtctttcctattttcctaacgggcttatttagactattcgatctacatatacaacatatacaacatagaaatgtgctctcttacggaataatagatagaattgaagtcattgccaatgtattatccatagatttgctatttgccaacgtttactcgatagaacacatatcccagtcgttgatccccacagcgtcagattcctgagcgtgaagctgtccagatttattcgagcgaggataagccatgacggctttctcgaagaagtagaccagcattcccagaaccttctcacagtcccgactgcagcgggccatgactggatgaacgctccactagtcaaatgttaacgaggcagtcagacatgtataatataaacgtactcacattggagtcatgagaaatcttcaaaaaccagaagtctttatcatcggtcactagcccatagatcgtgcaatcatttttctttaaatcctttcgacgcctgtgaacgcagccttggaacgatttagctccctaatatgcaatgacagaaatattataggacacttacccatagatgctagggtttgggctatacccttttgcacttcgccaggtttagttctaaccacagcagcaatcagcgcgagatcctccatatcgccgtaccagatcccatagtctagttctccaaccaatgtgtgcttctttttatccaaaagcacaggaccgtagctccatttgtgtttgatcttgatgccgaggaaccgagcagcctcagggagatcagacagaacgatatcacgagcgagaacaaggaggctggaggtaaaggtagaatgtggataggctgcagatgcaggaacctcacgatcaaatttcgataaatccaagtaagcgaaatgagatgttacctctcttgtcagttggctaggtataggaacaggaggcacagtcctgagctcattgtcattgacaacgtactccagattgcagatgacctcgatgtttttaatgagcagagatgtatttgtgagcatggttttggatgtgattctgtagatgaaggattttgatactatatggtgatggtttgtgtatgtgcccaggtatgatcatataatgactgcttgacccggcgctttaaatagaaagctaaattgcctcatccacggctagaaggtctttgacggatagtgacattgagaataactctattgtttctaattttggtataggtcttccatggttgtaggtcaggatatagcataccaagatctaggcctagatacatacatagagtccaaaaaggcctaattgattagttactagccaaagcgctacgtataatagcttgagatgggtaattccaggcaaatataatgctcggttgatcgtggatgtacaacaaaagacagtagtttgaagaagcacactggtcccttttttggttctagatatcaaacatctatgatacaacatccgacttctcaccctttcacgttttcataatccgccgtaagggtttccttgataatagccaaaatagccttaacatcttcatcagacagtctgagctcccgttcttcaataacaccgtccatcaataccaccgcagtgtaatcatcctcctcggcctctccctccccttccccatccacttccattgattcctctccattagcgccttcctctctagcttcctcagtagcaggattgccgctcagtcccaccccgagatttagaatcataacgacctcggctttggtcagtccgtatggctgtagacgggctactaattctcggagggctgtgtccatgggtgttatttctgcggaggggattggtggcggcatggaattagtatccgcctctgggtttgctgaatttgaggttcgcagcgtgccagtcattgcggcttgcgactgtgttttcgactgggaggaggaagggcggggtgtgtagcgggggtatcgtaggaggtggggggatagacggcttgcatagttgtgaatctgggagtttatcagccgttttttcttctatcgttggtctcttggtgtctggtttgcggtcgactgcgcttcacggtcgggctcatggtgtagttgaattaggccataacaccctgtataccgatgagaaggacagcatagggttgctcacttctttgaccactgtattatggtctctgagatctggacttggtgcccagttccccgaatttggcggtggtcggcggggtggattggaggttagataggccaggacctcaacattggtcaggacggcggtttgagggtcaatgatctagatcattgtgttaggagaaatcccgagcttcaagtgaaatagaacataccctcattttgtgtgttgaatgtggcaagatagactggcgcaactgggtgattggactgagaaaggaaaattgttcgaactgccggcagaaactgggcggtgtctttatctacctgcatatctcgaagtatacgaggcaaagcaacggagatgagacggaaacatacatatggagttagttgggactacattatgcgatacatagcctacaggtttacgatccagttgtgaagtatgaacagattattccagctaaaactgtactgccttgttcctaacgagcaccctctgcgccagtgaaagaccggtagatcaacctcaaaatgctccaaaacatgcgagcaacaggaagattgcaaaaaaaaaagaacagaaatgaaaaagtgtgatatcatacagatcccaggaaagccatccggtcacattgcacaaacttttgaaaacatacgcttactctcccttggacttcttcttcttcttcttctcatcctcgtcttcggaacgcttgcgcttcttgccatcgtccttgctagccttcttggcatccttcttggacttcttcaagtccttcttgctgattgaagtgggattgcccgctttatcaaaagtgatctcgccacgctcgagcttccgctcgtatcgcttgacgctgagaccagccttagcagccaattcctcaatgtcgctcttcttggacttcttcttgggtgcctcatcctcggactcatcagaatcctcagcctccttatcagagtcggcatcggccatctcctcatcctcaacctcctctacaagcttcttcttctccttcttggacttctgaacagcggcaggctcctcggaggccaaggcatcagcatcaggattgtacttgcgggcctccttcaagtcgaacttctcggcctgaacaccgttgggagcaatggccacaccacggggcttaatgggcttgccctccataccagcaagcttgcgctcaaggttgaagcgggcctcggtaccgagagcacatttctcctcctcggtggcatcgtcagcccactcggtgagggagtcgacacggataccaagagaggccttggcggcgaggatacgggccatctttcccttgttgcggccggtggcctggccgatcaaagaagcgtggtagatcagaccgtacttgggagtatcgtgcttagtcttgagggcacggaaaagggccttctcggcacccagaatctggatggtactggcggggctcttagacaagctggtaagggaaccagcgtgggcaataagacgggcaccaacaagatcaccgacaagggcagtcaaattgggtgcgatggcgttcatgcgggaagtaaggtagctagcaagttgggagcggtactcgtagaagccaacgacctgctcggcaagagcctggatgttctccagatcctcggggctgatctcggtacccatggagcggtcggcagcagccttgacggcaccctcgatctcctcggggaggatctcagcaagatcagcggagtcccagttggagcgcatacccatcttcagaacgagcttggcgtaggcaatgttgtcgttgaggatcttagccagctcggggaagtgccatccgtaccattccttaacacgcatagcgtaggtgttcagctccttgtcaagatcatcgagaagaccaatggcctggacgatcatagtatcgatcttgtcgggcgagaacttgagcttgtgacgggcgagagagtgggacagaccaagggacatggtagacatatcactgggggcaagaccgggaatgagggttgtgaggtgctcacgaatggcacggaagatatcgttggtggtggagtcagcaatcaattggatgtcaagaccgggaagcttgctgatggagtttcctattcacgatcacagtcagcatacatcccgtaggaagaacctttagaagattgacctaccgagcttggtatcggcaacggcgagggacaccttcttctcatccttgatgctgtcaagaagcgaggccaggcggggggtgaccttgccctccatgatggaggcagcctcctccagagctgaagcagcgctgtcaaacttctggaagctcttcagcttaagactaaagaggttttgttagtgccattgtcgccgataacaaaatttttgcgactcttcagagttggttcattcccactcaaatttttttatttggtaggattggaagacacaattgacgtacagattggagacaccctccgcagtagaggcctcctcggcgatatcatcacgcttgaggagcttcttgtccttggccttcagcagggcatagcccgcgctggtctcagtgaggatgaaaagcgtcatggtgcgcggccacggcgtttataatcgaaaaagaacagaaaagaataaacaagtcaaagcgaacgataaaccgagccgaggaaatgtcgaaaaaaataattagcgtagggcgtgtcggccaccggtgtcgttggagaaattgaatctaaatttgcacggaagaaaaaaagttgaaaagcgggtgccacgagtggcttagccgtgtggctaggtgcatgactaagccatatgcgtgtcctggacggatagagctacagctgggtctctccaatcatcttctccacattcaccatggagggcctattctttaatattaacggcgggtatgtggtctatatctttgcttggtccgaatagcgcccgttgttgactctcttagatacgttgagggcattgttcgcggctatcggaacagcctgttgaccggccagaactattccaacctcattcaatgcgagacaattgacggtacgcttcattgattccgctgactctgtcgtagaatataccactgcatattgattctgacaatctcgtccaatagatgtcaagcttcagcttgctccctcatatggcgacgtccttgcctctctttcccccaacccctccacgtccgatctggcgagccgcatgaccgataaactggtggctgaattcaagtacctggtcgcacaagcgacaggctcatctgccaagtttctcgaatatatgacatacggatatatgatcgacaacattgccctgttgatcacaggcactctgcatgaacgagacacccgggaacttttggagcgatgccacccactgggatggtttgagacacttcctgtgctgtgtgttgcgacaaatatcgaggaactgtacaactcggtactgatcgagacgccactggccgcctacttcaagggcagtctgagccaccaggacttagacgagctgaacatcgagatcgttcgcaacaccctctacaagaactacttggaggacttttacaacttcatcaatacccacccagacttcagcgggacaccaacacaggatgtcatggcggagattctgcagttcgaggcggaccgccgcgctatcaatattactctcaactcctttggcaccgagctgtccaagctcgagcggaggaaattgtacccggagttcggcaagctctacccagagggcagcctcatgctttcccgcgcagaggatgtcgagggtgtggcattggctgtaagcgctgtggccgattacaaagcattcttcgatgctgtgggcatgagccaaggcggtggcggtctcggtggtatgggcggaggtccggcagacgggaagagtttagaagatcttttctatcaaaaggagatggatatgtctaagctggttttcacccgtcaattcaccccagctgtggtgtacgcctggatgaagctgaaggagcaggtaagcctcttagaatcaatctctctgattttaagagtatgaaactaatatctcccaggaaattcgcaacattacctggatagcggaatgcattgctcagaaccagaaggagagaatcggaaacttcatctccgttttctaaaatcgactcgggcactctgtgattttctgttttcctgcctctttgtacttacccatctccctggctggcattttgctttggttgccaaccgcttttcgttgtatcgagtacccagtttgttctttaacgtgagcgcatcgacctcttttccttgatcgggagaatccggtcatctttaatttcggctgtgttgctttttttcctcattcgtatgaggcgtttggcatgtgcttgaccttatccttgtagcatagaagaacaaaatacagatatttattttgttggtatacggcgggctttcctacttgaatagatgggatgctcaagtttaataatacttgccagtccagcgcagtaagccctaattatgctagtaagagatccgttatggatatgtataaaggtctccgattaaaccctttttgcgatagacagtcctgcaagtatcgctcttgccgcaatgaagaagaatacacttgccaccatcattgcacccgaaaagacctgtaacccccaatacgtcccgttttgtctactcaagatggctccagcaatgggacttcctgtgagcgatgcaatactgatgcaagtaaataaaacgccctgacgaacaccaatcttggtcacgtcgggcgagatctggcctagcagggccggtaccataccgacaaatgcacccgatgcaaatccatatagcatgctaaatacaatatagatggccgcactgcctggggcaagaagggtacctggaagccataaggctaggatcacaatggcggataatgagcacatggcaatcatgacgttgaatcggcctagtttgtctcctaggtagcctggtaggattcgaccagggagactgcagactaggttagcacaatggcccttctcgtcaagtcaagatagacagtagtaatacttacctggcagcattaagtatagttgacaagtacccggctaggtcgccgttgacaccgtcctcctgagcttcgacgacaatgtaactgattggcacgaacatggcgaagaatccacagcaggatgccagcacaagcaagacaaacggtagctcggaaaatggactcgtataatcattcagtttcactggccgtggaacattccttattctcgatcggacggtcaagttggcagtgaccaggagtgtgaggatgatgaatccagagatacgcagtgaccatccgaacccaatactaggcaaaagtcgagataacatgcttgggaatacaacgccacccagtgatgagccgctggaaactattccaaaggccaaggcacgtcgtttctcgaaccatgtcgcggtacaggagagtgcggacaaaaagacaaagcttgcaccaagaggactgcagattccctgggctagcaagaattggtagtactccgtcgatatggagatcatcataataccaaagacgtgaagacatgttccaataagaagaagccattttgggccataattatcgaatacctgaagaaggttaacatgtatacctccaggcatgatggggctagactcactcttccaatgacaattccagtcgcaaagaatacaaatggctccaaagataaaatccaggagatgctggacgctgaataggactgtaattgattattctggtagtgctcttggaaaatgccaatggctggagcgaagtgtgtcaggttatcggtggcataagaaataggtatgggaggactcaccattcacccagccaaaagcgcaaaaaaggcagcaccatgctccaaagacgaccgtccaagcaggaagtccttgatccaactgtccaactgcttcctcctcatctgagacggccaccgtggttttcgattctatgggtgccatgtctagaggaaatctggatgatgagatgaggaattccaacggatgatcgcagaagcaagggcgagagaaaagaaaaagacaagcaaaacctctttccaacctttgatgtcaaggaaagacataactagatcatacatatccatgtaagaacagagagtcggagagatcccacagctccccgaaaaatgacactaaaaagaaagtacagaccgaagttacatcgggaccaatcaagtccagattagacagacttaggtgtacagttatagtttagcttgaggaataaaagataagattgacgatctctccttatgatatcataggatacatactgtactccgcatagatagttgcctcctaaacgggctatctcaagccaatagattctgcagaatatattcgtctctttgcaataatagattaatgattatagttttcttcaaggatgatagctgaagtgaatgtgtattagggcatggcacggcccggagaatcgctgcggatccaaatcgatataacccactactactctagtatctacatagaaaatgaggccaaaccctatgatagattcatcggtaaagtgtttagatagatcatggtagatatagagaaattggtaggcgagggtgaaataactagctcgatcatcggccactctaggtttatcatcgtcaatgttgtcttcgccgcgcgacttcctcgacgagtggaagttataaatatggcaggcacgttcgggttccatatccttagatcgtcataaaatgatcaggcaatctctaaatagcttcaattgacagaccagataaattgatcgaatgaatcatcataaattgattgtgaagcgccagatcgatcttgaacaagaaagactacattcaactgaataaggaagatggagaaagaaagaagaagcaagttgcaaagtggcagcggccagttgatatagctgaccactttgcaatgttgcaaccctcggaccttcttggtaaaccctatgcagtttatagacctctctgtggcattcatttccctctagtgttgcgggccacaagattcgggatacaaagaacttgtgcaaggattccagcattgttttgctacaaaacaaacctgcaatcttctagaacgatctgctacctcagtatataaatgtcatccctccactctacttccaagtttgaccttcaactatatctccttaattaacatatcttccaccaacctcaaccctcaagtgtcgacccctcatatatcatctatcaccttacatttccaggtaataccctgctcgacatgccacaagttataagaaccaacaaatcgattaggtagaggctctactcccgtgactcgtcatcacctctgtggtgcatcatgctaatctcgactgtctctctagatccatgccggtattataggccatcgacagaaggtgctttcctgtctctcctgggctcggtttttctggttgaataaaacggggacgtgtggtgttcccttagacgccgatgatgatgaagacgtcgggtttgattgggactccaagtctgtgggtgtggttgatgacttgaccgctgggatagacacttttgagaaggataaccgtcattcccactgtctgaggagtccgcatgtggcacaggtgagtcgttcttgtgtcgatcctgtttcggtgccgatctgctgacctgatgggcatttcgtgtcttaaagtgatgatgagacatccttatatagttatatcctatatatgtatggcaagcctccacatactattcgaaagggtctatactacgaacagcacctatggccagttaagaaagttatgtatgctctacacaatgccgccaacgagggagatgaaagcagagctgcgagaataagtgagtgaactacaaaaggaaggggtagaaggtgtggctaaccgtaactacatatagagaccgtgtgactttgtcttatactcaacgaacaactgcattaggatctatcgacgtacagacaagacaggactaaggagacatggcggtacaagtgatggtgttgaagatcatcgaagatttgcagttgcgaatggcatacacccgaaggactgtaagcctggattgcgattcagcagggctaggctatgcatttcaatttatcaactggcacattcctctcagcggtctttcgcttgctcggctactctcagaatgtgagagcaatgaagttcaccgaagttcaggagctctcagttgcctagtgatgaacatggtgcgcagtattttgccatgggaggtacacgggtatactgtgcattgggctttcaaagcacttatgatgagacacgagaaagcatccatctttatcatcatatgatgaactcgagcaaatgaatattccgaatatatgactttccgcgtatcatttattctagctgcgcaaattccgctagtcgcttagtatgttgtagttagtgttcacgtccacggatggtaggaaatatgcaccctgcaataataacctgccaatgacggctcacggtcccatatgcggccaagggaactgttggttagtatctttgtccagtattttcttttagaccaatatgacacgacccgggatatcaatactgtctggtagtagtgactccacgttgctctctcaattcgtgaaagtgactggttgactgcactcttcggatgtttaggggtccatgaaatcatgtactctgaatgcaataggtgagtagcaaaatggaaagggaaagggttcgagtgctagacaatacccgttgtaatatgcaaggatagagactgatcaatcaagcacagaccgacatgcatgagcttcaatattggaaagtcttacgtctccatgaagtatacagaccagccacattgatagtctagtcccagaccggcgattacatgcatgctgaaaaagaaattccccatttcgattcaacattcattgttcatatgtgcagatggcaaagggtgtggcagaggtagatagtatcacaggaaattcgaaaaagcaagaaaagccagccaaagccagatgagagcacgcgacaggaaaaaaagaaatgacagaaataccagaacaaatccagtgtaccaagtctactgcgagcctggatctatggcaaggggaattgaggttgtgggggtcgtagagaaaacgtggaaattttaggatatcggagaaaaggaaaaaaaaagtttaggcagcgatcagtcatactggaagagaacactgatactttcaccatggtgcacacggcggatggcctgggtatacgtcagtaaatgttcggaatagccggatgtatggaactcacctcgccgaaaacgtggccgacttccagaacctccagttttgggcaacggcgcaagtgctcaacttgatccacgctgttggtcacaacaaccttgtcaagagcactggcgttgatacgctcgatagcgtcgccgctcaagataccatgggtgagaagggcatatacctgagatgcgccttctttcttgagtaacttggcagcacgagtaatcgtattcgaggtatccgccagatcatcaatcagaatagttatccgatcacggacatcgccgaccaacatcatggtggcattctggcggtcggtgattttggtggggcggcgctcctagaaattgttagagtaacaggaaaattgaagagctcaatttgcctaccttgtggatcagggcaaactccatgcccatttgatcagcgattgccgtagcgcgcttggcacctccagcatcggggctgacaatgacagcctgcttgtaatttgggatattgtgctgaatatagctcttcagaagaggtcggccgtataggttgtcgacggggatatcaaagaatccctggtactgcgggtcgtgcaaatccatggtgatgatgtgatcggcgccggcgcaggtgagcaggtccgcaaccagtgtgccggcctgtgcaacccactgtttgtagccaggacgcggctggaaggaagtgatcttggaggaggtgctcgctgcgtcatcggtgccgttggtcaaagacttaagggaatctgtcgtatcgctgcgaggcaggccgttgccccgccgcttcacagggctgccagtgctgtcctcaatctgagctttggcaagacccttctggaggctttcaattccattcaccaagcccaggccttcagttcttccaccaggacccggggttgaaggggtgctctcgaatgtgtagccattgctgggtttgccccccacagatgccttgacgagaggagcaccggccttgtcataaggaatatcactctgacgagagtaagggaaaagagggagtacagcggtgacccgccgggccgaagcagtcttgcaggcggaaatggtgatgagaagctctagcaggtggtcgttgactttaccgccgccggattgaataatatagacatccttttcacggacggactcttggatttcaacccgagtctcccccacggcgaattttgagagcagaacctccgcgggaggaatgccgagaacattgcaaatgctctgagtcaactgagggtgggagttgcctccgatgacgacaagattgcgaaccatcgtgttggcttttgtggatatcgccaggactggagtaagagggatcaagaagaagggcgctcgatctgaaggaaatcaagtttggagggatcggatggagggggaagaaaatctggggggcgatctcggtgagcagtcaaggcagtaaaaaaaaataaagaaaaaacaaaagtatagggattcttgagatgaagaaaacaaatgctacctcatggcggaggaagaattgacacttcgagagacggagacatgaaaccaagaaaaaaaaaaaaccgaccatgtgagtcccgcgatgtgaaaaaagcctctttagagtggagcggacctgtggctggtgcctcaggtggcaaatgacccggattgggtaaagcgcatgtcgtgacgaggccccgcaaaaaaaggccctgcttctggacagacaggaacgcagtaaatggtcagcaggtttactgcttcggattctccatttgctcccggccatagatatacatgatttggttcaattcccccggtcgctttggaaatctcgaagaaaaagcaagaaaaaagaaacatattcatgactcctatgctccggtccccgagatggtatgtactaagaaaagagaaacataaaagagcttggcataagtctcccaccgtgcagtttgctccgagaatccgtcattcgcccgttccgacctccctataatataattagtatgacagttccggtatccgaaagcgggtttgaggctcacaagtcaagttgaactccgttgctcactccataatcctccagtgtaagctgatctttgaaagggcgttcgccctgacgtttgagaaggatttcgtggggttcacggccgattcgagctgccacttgggccttgaatagctctgcgtagaacattagcacactggtggcggtcaatagtaaaagggagacatactgatcggatctgaggcaagacaagggatcgcagctttagttcccaggcgatcattgacatggaccacgatcataggttctgaggattgtggagcgaccggtttcttcttttctttcttcgctttcttttccccgtcttcgcgcggcgcatctcgatcggcacgttgttggccccggtcgcggtcaccacctctcggtctatctccagatcggtcaccctctcggtcgcgtcgtggtgatcgtggtcggtctcggtatccgcgctctaatctgcgatcatcgccgcgggaatcgccagtgcggcttgtgtccttccatcgaaagcctccggtctttctagggcgctctctatcagtgtttccgcgcgggccaggagacctgcttcgcgatcggtcagccatgactatggatggaaatatggaagttgcgtgggtgcctgacaacccagatgtaatctaaacgaagctataaggcacgtgatgaaacgcagctgcccagtggagtacgctagtccaaatttgtattagcgtgtttattcacatcaagagctctcctgtctaaagtacgtttgaatttctccgcacttttgatctgcatcttgaatagacaggctataatgcaaattggcaactgattctggctctgttatttctttcacctgactcctccatacccaaaatgcgaggccgactagaagttcagcgtccctctccgacgaccgtctcctttaccgtatcgaatgcgccccagcagtcaagttcccccgccaaaataatattcggtctccaagtacttctgcgtacggttttatttttctgtgttattggtgtcggcatcgcgcgtgtccgaaacctcttcttccaagaagatgggagggtgataagctggccagccctctggtcgagcccgctcggatccaaactgtgtcgcttggtggattcatacaatccactgggaattgccgtggctggtgcattggtgatatacggtgttttcagaagaggtcatatcggtaggttgagaaggaagagttggctatattgctgttcatggctgattgttcgacagaggaatcgctcttggttattcgaggtttcggaatccagacctcgacatcttcctcgacatatctttctactgcctcaacgaggttcattcctacgacgcaaatccaggatattgtgattcacgaagccttcaagggcttcgaagtccgcttctatttggcggtcattgttgaaggcgagcttgatgccctagtggtcttcccggtatgtaatatcctcagcgttatactctcagacctaattttgcgactagcacatgttgcccaggcgagagatcttagagcaggtttggagaggttctcgacggtgtctttacgatgcgaagtcatgacatacccacagtctcttgcctcaagaaatttttgctcgtgcaaaagcctaccttgctcaagcccgaggctcgatgctttatcaattatatacagcgagattcattccgatgccgcttgtgcaccctccatccttgctagtcttcgctgctttgtgagaagtcccttggcattttgaacttccacggtctccatcttacccttctggtcgacacggatgtatttcccgccaacaacagtatcgtttccaccacaccagaccttggcacctctgtgtcctcttttggaataacccgccttttgccactgtttgtcaagattttccacgttctggtcaccctggctgacagtcaagtctagcagagcacccgctagaatctcatctatctttcgctttctccaaacggcccacaaactttcaacggtaccccgcagcccgaatttgctatcacccttggcggttcccttgcagtttgcagcattgtcaccagcatagacccagttcaaggaatcctggcgactgtcggaattcagatcggggaaaatgcagtcccaaagcaccagcggagcatcatcagccattgcatatattggcttttgtggattcttggtaatgtccagcagttcagggacgatagatggggactcgaatccctgtccgactaggaacagaattgcaaccatgtggcgcacctggtgccacaagaaggcagaaccgtggaggttaaacgagtagacctgagggatactttgagaaaccgtattgggagtcgtcaaatccggttcgggcacacaaccctctttggcctggaatccaggttggccaacataccccacggggttgaccttgggattgacggcttcgatactagagtgaaggataatgcgttcgaaattatcaatctgcttgttggtgtccaacttgcagaaattccggaagtcatgcataccctcgaaatgcttagctgcctcgcgcatagcctcaatgtcgagccagccctcacggaactcagcacgcgggccattgccgttctctgcgcggttctggaacccaaggggcccgggtgtgggagcgaacgcggggttggtgaagaagtacttgtaccgacgttcacggcaggagaagcgggcatcgaaaccaggcggcgggttaggacaccaagccaggacccggatgtcttccggaagcaccctgtttagaacattgatatagttcatctcatcggctacatcatcccactccttttcagtagatcccgagtcaacgcgcatcgcatcctcgccctcggtgggagtcttgggcatgggtcgttgactgcggacccgcagtccaataacctgcccaaaagcgctcacgcccttatcggtacgacctgctttggagtaatcgcatccatcccaataaaggtggtaggggcgcatggggacgcgctcccctctttcggtcggctcaagatcagaggtggtgccgggggagatgagttttgtacgccgcaatgccttccacataatctcttcaacggtaggcagaggcgtggtattgccgtttgtatgttcgagcccattgtatgcctgtcccagatatgcgaacttgagcgcaataaaccgcgttgtgtatttggaggggtcgaagctgcgctcgggtcttggaggtttcggggctttgacaagccgcgtcggcgcaagcactggggtactgtcgctatcttgaggagagtgtggtcgcttcgtagaaggattgaagggctcggtaagaggaatcgcagcctcgtggacgtcggtagcgatgggcgcggaagaagagcagggtgtctgcaacgattcttcggttggcgctgtgaactctgtcgtcttagaggacagctggcgctctaactctgttatgcgcgcgatcaggctggaattactccaggccgagtagtcgggttggcccttgcttttagtgtcctccatggtttgggatgtgagagtgcgagattggcacaggtatcgtgcttgcctgagagcgtgctgtatgttgcaactcagtggaaagagtctagcagacactctccacataccacatcagcgactgagtcaaggattggattggtgcggacgtttaaccggcgggaatcgaaattgaaaaagttgcgcggaggcgctgtttggtgtatttttagtattgagtccctgtacgaaggtgtaattacatgcactttatggtcatagctgtatgtattcaatgtatatcactgtactatgataatttatctgtaaataaattactatatgggctttttaaatcattaataaggcaatataaagttttaataagcataaatgacatgaggttaggactagcgaattaatatatatataaatcaacaactgtgttggaacgccaagcaccgaacttgatcacccaaagtattcattctctgaaatcaaatacaagcggcgaaggtacttatatagactgtcctacattcacaactgagacaattctctgcaatacacttgttaattgaccggccgaagagtgcaagttgaccgatacctggacagttgcgcataaatcgaatcaacagccattccagcatggctgaggcagatcctcacacagacggtaacaaaccagtctccttacttctactcggagatgaaggatgtgggaaatcaacattcttagcgtgagtacctagtcatccgacggactgcagcctagaagctaatctcctgggctatatatatgacgttatatgggaacatgctaacatgattcagtcgcctaaagagtggaaggtcatccccatcagggacctctaataatgactcaaataccattgaactattacgagatagtgatcagcctttcatttacgacatccgattcgcaaaaaaaacattcactctagaacttaacgacacatccaacccaaaccagcattggacaagccttcgtcctgacttggtcgttctagcctatgatatctccaatcgagacacacttactgggctaaaggaggtaagtcaaatatataattggagtaattgtaaattggtgctggaatttgacactattgcttagtggcgaaatgatattacccgttacttccagtacggtcacggcgagcgccttccagtaatgatgctgggcctgaaaagggacctacggagggaaggcgagggaatcatctatccacaagaggtgagtgactatgaattggagtttcacgccttgaaaattgacagttatctaggcctatcgtattgcgcaggaacttgtttgcgatagatatgccgagtgttcggctgtcacaggcgagctgcttgcagagacgtttgaagatctcgctagattggcggcaatgacgaccactgcaaaaggtggccagactgagggcacttcttgcgttattctttgattatttcgtcgtccatgttcgcatatgcggctttctaatgttgaacttctttatttttctattcttagtagcctatgtttcagctagagagtatgctctatgcaaccactaagatattacagacagcagaccagattctaaataacaaataccatggagacaaccaggacagccaatacagatatcagtgagtgcctttctagcacttagaccgctaccgcgctgactaccaggcagggcgggtggaacggctgtcgtctgcgagctagcgatccaagtactagaaaggcttattgagagaaagagagatatactaatacccaaatatagacgaacaatgaagtctacagccaggcactacactacaaaacctactggatatgataccgagcacaaccttttcagattactagaatacacacagggaagaaccaaggtaacgattaagtccacctcgtgaattgacagcacagggctttcccccagaagcttcgtaaataaaagcaactggatctctttccctcataagcgccagtcaatgattggcaatggcaattcctccccgatgcaaaaacatggaaataaaaaaaaaaagtgctggtaagatgagaccactgaggcaaaagattgaaaggttcccggtgaaagctcgttttcttctgtttttcagtttcttttcgtttttttggagaattgcacacagggactaggatagacatgtcaagggaatttgagggagattgtaatccattgttgtgaatggagtagatggtgtataggagaaaacaagagcctttccttgattcccgtgcctcgaaggacccagaaaatcatcaatcatcccagatcacccaactttttattgtgatcaaacttcccccctctcaacgactatccttgtcaccgcggagcaatttaccacttagcctcaccagcggcgggctgagcctcagcccactcggtggtagcgggagcggagctggcagcccagtcaccaccctcggcatcccagctggtggcaccagcagtagcggtggcagcggaggcagcagcgaaggcagtgccggggttaccagcgccaggggcggaggcatcccagttctcaccagcgaagccggactcgacggcaccagcaccgatctcatcagcaccggggaccttagcctcatcggcgatctccttgttctcctcggcctcggggtcgcggtagaagtagagatcgacaacggtatcccactcggtctcgcgggtagcgagggtaccgcggagacggaggacctcacgggcgagcatccaccagacgagaccgatggcgtgacgacccttgttgttggtggggatggcaacatcgacgaagtcggtgggggagtcagtgtcgcaaagggcaatgacggggatgttgacgtaagaggcctccttgatggcctgggaatcagtgcggggatcggtcacgatgatgagacggggctccttgaaagaacgggtgatgtagttggtgaagttaccgggggtgaaacgaccggcaatggcggtagcaccggtgtgggaggcgaacttcaggacagcacgctgaccgtagggacgagcagagatgacacagacatcggcggggttgtcaatggcggcgatgatacgggcggccaggacgatcttctccctattgcagtgaaacatatatattagacactatattacagtcagaagtcacttggctgtcgcgcataccaggtcttgccaatgttcaggacgttgacaccgtcggcgcggagcttccagaggtaaggctccatgtgcacctgaaggttcttggaaccaaggtggcactgcgcggcaaggagcatctcaatgtcctgcgcggtagggttgaaaaccgggggaagctgggaaggggccatgttgggcgattgatggattgatgagttggaggatcaatcgtctggctcttgtcgtggtgatggagggaaaaagatcaaagccaagccgcaaaattgttgcactctcgcgattcgggagaatttcgcttgcgtgcgctagggctagggctccggggctgggcagttgattacataatattagtcttgattcctcgttcacgtgatactaggtgcctgagtcagcggacgtcctgactaggattagcgtaactagacctccggccgcaagatttcccgaccaaaggtcaatggaaaagagaagttgcttgtgacaatagagccatctactcgccagctacgcccaccatgcccccgcgcgtttcagtccagtcctctctgaaggcattgaccggtatgctacttgaaatccgtcataccaatcgttcaattacctgggtgctaaccaagacttgtttaggatcaacttacggatataccccgttgtctaattcgatcaacactactaccagagctgtgtccagcaaggttcaaattcgaaagaaacatgacccattcttgatggcccaggcgcgccagcgcaaggcagcgaacgtctcccgccagaaagtccttgcagaggaacggaactcctcggttggcgaccctgtgaagagccagccgacaccatttatcctagagatgacagcaatccaaaccaactcgcacatcccatcatctttggctggggatctcaactactacttgaagtcgaatgagctggatgccgctcttgacttctccaaggatttgacagcaccgcttaaaaaccctgatcgcaacacagccgatcctcaggttgagaaggaggcagtgaatttgcataatcaagagcataagaatgcccaagaagcaatcaaccggattgtgaacttgaacaacggaaacaccaaggaccgcgtgcgcctcaacattacaaagtgcatcgaaacattcgggcgacactacacagacttaaatctcccaccaaagccttcggctgtggtccatggatctgcccctgtgcatccggaacgcgcgccgcgcgtcggacccgatactggctctgcagaggtgcaagccgcgatcctgaccgtgaaaatcatgaacctctcccgacacctcgagactgccaacaaggacaaacacaacaagcgcaacatgcagctactagtccacaagcgccagaagctgctacaatatgtccgcaagaaggaacgcggaggtccacggtggcagaacctgatggggacattgggattgtctgacgctgcgtggaagggagaaattgctctatgaagggctttgtttaataagaggtcttttgtgtgtctgtaccattctcttcttttgtgattggctggctttgaaaaaagtatcagcatgttaccttgtatcatctatctaggagctagcgagggctacttgttggtctatgtctctatttctatgtttcgcccgcagagtatctgtacaaatagcattgtttcttttcccacatccattctcgtgttgaaatcatctgaagtagccaacttgctattgcagcataagttctagaatgtattaagtttcctctaaatgatcagcggtattctcatatgagatggcagtatctcgattatgtaggctatttattggctatagatgtttcattttgtattactatcggaatgatacagacgtgtgtatttcacttctggtctttagtgctaacttggctaataattatctttttgatctttgctatagttttaggaaacaattttagtatccagtgatataattatcgacgttgaacatatatgtacatagttacctctaactactagtatttacgtactccattgaatatacgtaactaagagatctcaacagtgtagttagttatcgcatcttaagaccatagctcagggaacgtcttgaagatgcaacgaaagttacaggaggaattgcgtttggaaaactcagtatggaaaattttattgttcgtgaaatagccagttaggacatgaggctggatggtcgagtaaggactactttttcagtgaaggcggtagcgctggaagtttattgtcaagtatgtgacgatcccaactacgtatatctctactcaacatggacggagggtaagatttaatggacgtgataccaatgcgggaaccaggttaatctatctgctgctgtagtcgccggacctgaatgagaagtttgtttttgccgagcttcaaagtatataagacgtaattggacctcctccatagatgatctattaagtaggtcagggagagagacgaaagcttttcctttgcccatttcctagattcttggaagccttcatctttcatctttcggaggccctcttggtcattgcctcatgttaccctctttccttgtatctactaagggcacgatagacttccgctcctctgtgtttcctctgttcatcaactgcgtagaacctctcagttcagtcgttccaacgtaaccgggtcttgtcatctagaagctaacaggcgatggcccacgatttcggtctccaacgtctctgaagtcgctcattagagaacccacgccacctaagttaacgttggtttcccgttgcctaattttgtcggggaactagacatcctcgagatcgacaaccataactttgccatcatcgcagctcgcattgtcgcagaacgataaattgtctactttttggtcccagtgttcagcaccatgctcatataatatcttgagagcttccataagccgggtttccaaatttttctcgtggaccttgatcttgttgtgagcgaggtcatagagagtttgacgatgactgttgtgatttatggtggaatagtccgttcaagttctaagcggtgtactgtgctacatcgtgaatgtagctgcttgacattttttcgcagtgatggcttggccgtctagatagaacgtctaatgatgtgtgagccggatcaagagatccacatcgcggctagaaatatatattttacctgggaggattgagggtcagggaaagggcatcaggcctgggtagtgtatagagtggaattaacaataacctagtgaaacaatgcgtgaaatcaaagaacaatgtcaataattggaacaattggaacaatagagtcccttgcgacagcctctatagagggacataccgcctagggacccggtattctgccgggtcgcgccttccaactccgaaaaagttatatgcgttggcgaccaccagacaatcgctggcgactgcgagacaaaccgctctttccttctaattttttggtcgcgtccaccgcattgtttacctatttaatcccctctcttccccccctctctctccttctcctcttctcctctccatcacccacaacattaccatccagagcattgcctttggatatctctcaccagagtcttttgtgatcgactctaccaatcagtcagtatttacatttgtaactagatagcctttggatatctctgactgactgatttcatttcaataagacttccctcactttccactcaccacaacctcgacaccaaccatcctcctcatcttgcgcatttcgccaagatgagactgcggtcgaaccacgttcttcggccagtttcggagtacgtcccacgccgccgtcgccagacgcggagtgcgtcggcacaggctgggacggaggccgcgacagagactgtgccagaggcacagtctgcaccagaccttgccgagcagtatgctgcagaacggcccgctccaaagcggaagccagttaagagagctggccggaagaaggtcagtcagaaaacaaatgtcacaattgttcattactaattcatgttcctagaaggccgcgcccaagggcaagaagaaggccgctcccaccgcggagcctgaagctgctgccggcaccgaagccgacccccaggaagaccccgttgcgctcattccgtctgtggagcaaccagacacccgtacgttgccccccagtcccacccaggctacccaggccacccaggctccccaggcttccccgacccccccggtcccccaggctccccaggctcctccccagcgcaagttcagagaacgagtcatgtcggcctttcggtatgggagagccagcgcactcctccaaagagagcctgagcgagccccttcccctccgcaaacgcccgtgatggagtatgcctggccgcctggccaagtttatgatagacttggccgaatcccctggtcacttccctggaccccaccatccccctggaggaactttcctcgcagatttcctggcgtcaatgccccggatgaatcccagctgacccccacggaagaacccactaggaaacggaaccgatcatccgaagatgatctttcgccttcgaaacgtcacaagttgaccctccaaaccccacctggcttcgaaaaccgtcctcgcggcagctctcgcagaacatatgcggatcgcgcgcgacgacgcgaagcggaaaggggaggacgaatcgatcgcaccatttaccgtttcccccaactcctggctcagcagggagaggatgcgaggtctggcagtttgacccccgtggcctctcaggcaagcgaagagaccgcacctcagggtaatcgcattgtcccgctatcctcattgccttctgcactcccaccgaatcagaaccaaaatcagaacagacctaattggcgccaatggatattcaattcagtgactggtatttggggacgaggcaatgcgcctcaaactgcagaggtcccacaaggtaggcgcccctcatatcatggcatatatttatagtggctaacatggtgattctagtggtcgaacctgaacatccaacgggcaatgactccgtcgcgacaccttcctcagcccccccttcttcctctgttgtggcgtcacgaaatttcgaatcgcccactccaagctcgcgcgttacagagccacaaaccgcaaactctcgtctgacagccagggcacgcgctccacaagtcggcacaagaaagaagtactcctacgatttggacccacaagggttcgacccagaactgctcgcgcgcatgcgcgccgggatgtcggatcctgcggacctcgaacctgtaacttcaatcgagcaagttcgtgcgctttacgataacgaatcgaaaaagcgcaagcgagaaacgtcacccgatgtcattccacaccctccaggatgtagctacgggtttgacccagattacttcatctacgatgacgatgattacgacgacgacttgcccacaggcgagcaggaactccaaggtaccccgaccaaacacgctacagtcagcgatgcaccggaagaggagcatgtctccaaacgtttgcgccaagatcccccaactcgacaggctacagtcagcgatgcgccggaagaggaggatgtctccaatcgtgtccgccaagataccccgactcaacaggctacagttatcgatgcgccggaagaggaggatgtctccaatcgtgtccgccaagataccccgactcaacaggctacagtcagcaatgcaccggaagaggagcatgtctctgacaatatccagctggaaagctccaacgaccaggtcacgtcggagcccattgagtattccgccgaggaactccgcaaggcccgtcagatcgcagaggctcgtcagaccgcagagcagtacaagccgaagacccccagtcgtcttcgcgcggcccatcgcttctcgagtagctgtaactcgtctattgaggtggaaaccgtccaacgtcgcaagatgagagaaacctcaatggctacggcatgccccactggcgatctaagccagatcgagtggcccgagactgaaacttggattgagacctttaactgggacgatcctaactttgagaaatatcagagaggatctttcgtccgcactgatctgtttcccactgaggaggcacattttgatgcttgtcacaaggagtttgctgaccttcttgctgctcggcgtgcagcttagtaaatctaacaaaaaaaaagacttgccagagagggaaccttcagaaatacctggaggtcgcatctccattgagcacccggttcccccctagggaacgaaatacaactacgagattccgaagagcaagcttctcggcctgctacttatcaaaaaaattgaaaaaattgaaaacaacgaaagaaaaagatggaagtcctccgggttccctggcccgcctttctaggctggggctagggctcccttggcccgccttgggtctctgatggaaccaggctggtgccggtttttgctggcccgccttggagctctgaactgggcttgggtcgagccttggaggaaatcctgtatacattctttcggcgttgtgactcgttggaccgccttggatgcatgggcctacgagtctacgtctttgtctttttcgtcttttgcgttttgcgctttgttcttcttgctatttagcgcatgtaatgagtgaatattagcgttgttaaggagcatttgaaaggattgcttagcttcccatacaagtcaacagattgtaaagactaggctcgtctagagtgacaccgagaaattaaacccaggatatggtattgatatagatatctattatgctattttctaacctagtcaaagcccttgaactcactatcgccattggcttcctccgccttgctagcttggtccaacaaccgctgttgctcgttcttagcacgaatctcctccagcatgcgctccgtttcaagagccttctgcttttgatcctctggcaattgctcccatctctccttctccttccgcgccttgttgaactccctcttcttgaactttttatcccgttcttcagtcttctgactccaagccacactctccgtagcacggcgcttgttaggaccctgctcagtgccttgtccattagcagcctccgccatagcctctttgcggcgcttttcttgctgcttgtccttgtacgtgtagttggaccaatcaagtttaatgcctagcgtccgatctccttcaaaggagcgggcttcgggcatcttcggcagcttgaggagtccccatgcctttccgagagcttcccagtccagatctgcaactcggaagatactgcttgcttggtgtttgctgtagctgcgcagccagctgacgaacgccttctggcccttgtcgtgcatagcgcgatcttttaacaccgctttgcggaccttgtctgtcgcggctgtggcctgttcgtccgtgaactcgggtaggttgtatggcgccacgggcgttttgcggatttccaggaacgagacgtagtcctcctcgcgacctgggtggatgaggacgatgctgaggcctcggcggcccgcacggccggcacgaccgcatctgtgaatgaatgttttggggtcggagggtgggtcgatctggactactagatcgacggagggaatgtctagaccgcgagcggcgacatcggtagtgaggaggatggagggcgttgtggaggtaatgaagcggttgaagttcttttggcggacgttggcttggtgtttcccgtgtagtgggactagcacatattcgtctcctaggattatgggtagtattgtggcgaggtagtcgacactggagcatgttgacacgaagaaaatggttttttgaggtgtgggctggacattggaaaggatgtgcttcagaatagcatatttgtgaagcggaggtgttgtcaagtaggtcatttgcagactgttcaatggttagatcggtcatttctgaatgggggaaaaattcaaaggacatacctcgctggagtgcgcttttcttcgacgccagctcctctgaccttgacggcaattttgacgggatttcgtagaccaagtcggacgatctgatcaacagcctcactgatactggcactgaacaatcctgtacgtcgctgcttgggtagccggcctaagatcttctgtaggtcgtccttgaacccaagatctagaagtctatcggcctcgtccaggacaagcatttcgaaagatgcctgagggcagtgaacgtgaggcgacgaaagtaactccaacaagcgtccgggtgtagagactaatacgttgggcgaatttttaaggaataactttagatcttctgccggagatgtcccgccgcccagaagaagttgtgggacgaccttcaatgtcgaggaagaggtcttcgcacgaggagcaccatcttcggcgggttttaaggctgcggccgacgctgggtggaactccaaaagggagagaagaacttggtgaatctgtgaggccaattctctgatataccgatattagcaacgagctctgcagacctggacttgcgcattacccaccttgtaggagaaatgacaatggctccaacatgatgcttcttgagaggctgatcaaggcgaagaagcttttccagaattgggatcaagaatgacagtgtctttccacttccagtgacagcttctaccaccacatctttgtgctgcataaacagaggaatggccgaggcttggactggagtcatgcgcgtgaagcccattgaggccacagcgtcgagggagcattctgacagcgggggcgtgagagcatcccacgctcttgaagatgacttgggaggcatttattaatctcaagagacaccgagtcgtcaaattgcttcacgagccgccatcgcaaagaaaaaaaaatatccgttatcgattagataccagacacgtgaccacggctgtggtcggaaaccgagatcgtgaatctgtttttctctcgacttagccttgcttcgtttactttacttttacatggtataacaagtgcttggtgatcgcatcatgtactggaatcctgccttgtgtctccagcttattcgtccataagtaacaataaagattcgtcacgtgccatcgaaccgcctatcattgctttgttagcaagcccattgatattttcgtggctcattcgtttgcgacaacgcagatatctgtacgcccaccttctggtgtccttcgagtcgtaccgattccttctttgaaattaaaggcgcccgacatgtcctggtcacaacccgtaccagaggcacctcgcgtgctgtcaccgaccccctccagatcggaccggtcagagacacccgacggatacatcgcaccgatgacaaggtctgcagcccgtcgccagcgtgagccagatggttcagccgaaagttctggctcagcgcgagaatcaagatctccctcggctcggcgcaaccgcccctcacaccccccnnnnnnnnnnnnnnnnnnnnnnnnnnnnnnnnnnnnnnnnnnnnnnnnnnnnnnnnnnnnnnnnnnnnnnnnnnnnnnnnnnnnnnnnnnnnnnnnnnnnnnnnnnnnnnnnnnnnnnnnnnnnnnnnnnnnnnnnnnnnnnnnnnnnnnnnnnnnnnnnnnnnnnnnnnnnnnnnnnnnnnnnnnnnnnnnnncccccatgatacccgcttcgccgccgcgctcggaaaagggtaccgactcgaacacccatctatccccaccaagcattaccgacgcgctgcgcgacttgtcaagatcaccatctcctctcggactgatccccctgcatgcacgctaccgcagtttcattcatcgccatgaaatcccgcgcaagctcttgcacgtgtcaatcgggttcttgactctgtcgttatacagccaaggcgtccaaacgctgcagattacaccagtgctctttaccgtactggtgcctattgccgcaacagacctgatccgccatcgcttcgagagggtcaacaaggtatatattcggtttatgggtgcgctcatgcgcgaaaccgaggtcaccggctacaacggcgtgatctggtatctcctcggagcgtacgtcgctctccgcttcttccccaaggatgtcggcgtcatgagcgtgctactccttagctggtgtgacaccgccgcctcgacattcggtcgtttgtacggccgctacaccccccgtctgcgtcccggaaagagcttggctggtactatggcagcctggttggtgggtgttgtcaccgccgctgctttctggggctggttcgtgccttacattggcgctttccccaatgacccagaagacgcttttatgttcacgggacgcttgaatctgctcccgaactgcgttcgcggccttctgggttgggagcctagtgattcggcggtcatcactggccctttgtctctaggcgtcatgagtttcgtctctggcgtcgttgccgctggcagcgagttcattgacatttggggctgggatgataacctgacgatccctgtgttgagtggagttggcctctggggtttccttaaggtctttgggtagatggataaatgatacactcctgattatttctcagcgcttgcacaatattccctgctctttttttaatgctatatctgggtgcttgacggttagtattcgggcatttttctcttttgctcctctacgttctggtattgtgctgcatcaagaattctattcttgtttagatagacactggtggaagccatgcacattttgatactcctcttcttttccgtttctattctttggatgtgtgttctgcatagctactttctgggacatggctttggtacgttttcggatatatgcatagggtattcttatttacaatttctgcgacatatgtacatggcatccagcaatccatcctcgagaagtcagctttcctgagtcttgatagaggtactcggcatgtttatccaacgccgtaggttaacaaaaaaatgcggttgctccacattgttgtatgcaaaagctccagacccgggaaaattcaaattgatgccatcgccaatccgccaaaacgagaagaagggtataagaaagatattaatcaaacgaggtcaagaaaactgacgcgtgggattcttttctttttggcaggctgagtctgtctgcgcgctgtgctcaggctatcggtagctgagccttcgcatggatcttgttcatgcggagacgggtcgatcgaccaaaagccgtcgtgcaatataatgttttccaagtgccctatggtcttatgcttcggcgttgtgctcgtcccctttgaagacttcttaggagaccaatttacctcattaatctcattgttttcgtatgtcttcaagttcaatggtaatgtatgttcgggctcgagttcgggcttgggatttgcttggctgcaagatcggggtggtctgatatcttcgacttcagaggaacgagtccgaacttttggtgcttgtggtgccttcttcgttggcggttgacgcaacgagcgagttgcggtgttttcctcgtcgattttcgatgacagagaaagggactcgatggctttttcgatgtgttcaaccctggccttttcttcacactgcaccttgggaatcttcttggtcttagataaagtcttcccggacagagaaggcagttccaagagtgctctggctgggaagtcctccgtgaaagtttcagattcacaaacgtcggagaccgagtagctaattttgagtcccatgcgtcgtgtcgggcgagacggagaataatcggtgttcatgtctagtgcgtcagattcttcaatatcaacctgaccagttcccaaagctgtgcgccttgatctaatgcgagactggtccgatatggggtgacgcttgatattggcagaaggagacaggttacacattgaagagaatgtatcaaggagaccatcgacttcccgagaaacgtagtgcatcgtcagtgaagacctctgcggaatatacatgctcggagaggaaaatatatcgtcttcctggtccacaattgttggcgaagaagacccagaattggccacaagtcgggaaagaggattctgagccgatgtagcggctttcaacaagtgtgtttgtttagttgttgacagttcggacctttctttcgtgagagttccgtatttcaggatactcccccgtttcattccagcatcaattggtccctttttcttgggaccggtgcgccgagtaccggtcttctttttcgccgcagcttcttcggctttcgcggctttttcagcctgttccctctcccaatttttgacgacctcaggaacacccagtcttacgacagtctcgaatatccagaccttctcgagggagaacggatcaaattgttttgtaatccgagtcttcgacggtgccggaggtggtgatccagcaactacctctgggtcatcctcttcctcagcttcctgtacactaacttcggacggcgggtttggttcctcggcaaggagatccagcccaacaatatctgccggtagcatatctagctgaagttctggcactgcatcagtgccgaaacttgatcgggttcgatacaccttttgcagaccaggtgggcaatcgggcacaaatgagaaaccaggcgacacgcctagaactggtctctggagacggagtctgtatgagacaagaggctcagccaacagtctgatcaatttccttgcccccgatcgataattccattcaaaatggtctgcggcaaatgttcggattgctagggggtcgatatctttgtcccaagcctgtacgagacgggttttcagaagtgccatctcttcatcaccggaaactttgggctgggcgtagtactcgagaatttgtcggtccggaaaagcgtctggaattcgaactgctgggtgtttcctcgtaaagtatccactctcattctcctcaagttcatattggagtctttctctccactcgttcaaccctgcatccacgtctgcttgcgacgcaagctcctgcagaagatcctcgccaaatccagccttggcaatctctgcagcgagcttgctgccgcatttcggaacaccagatggtaaatagtcccctccactgagcatagcgaataggatcattcccggtcggtcaaggggtatattggatggatgtccatcctgtcccattgcatagcatgtaacatgagttgctgaagagctgccgcttccgctctcttttgagaagttcataatagttaaagacgatccgaacatcaatgcgtcgacatcgttgctcatgacagcgtctacaatacctgcctgctgtaaccgtgcacattcggcctctgcctcgccgggtgcctcatgccacggaaacctgaatcgttcgatgaggtccttggaacgcttgatgatcggcgcactgccataactgcgagatgagactgctttgcctctcttaaaagcaggtttttgccgtccatcatagacaaaaagggggtggactggcaatgcaagtaacttcaataatcgataaaatagtgtgcgtagctctgggtttcttccgcctctacccgcttgaacttgaaagagccagatcgaaatgtcgactgcaatgcgaatcggtcttgctgtccgctcgaggtgcgtcactgccaacttcgccagagagatacgctctcctgggccaattgcattgatgagccttgaaaagttagtatttggattgaggaatctggagatacgaagtccggcttcttatgcgatggataaacaacgctttcactcggtgctcatagcgatatatatgttttccaccatgtaaaataaaataggatatatgacttaacttacccaggaatacccatgccgactgtaagcaatagaaatgggaagcagttcaagtgcccatgtggtgttagaagatgtacaatatgcagtggttttgcggagagaggaagttgtgaagtaaataaagacggcccgatgtagatccgttgcctaccaacgagcttcccccaaccatttgggccagcttatagatcttatttttactttgtctttgaatttaaaccgatggcattgaaacctcgacctgtgcgcaggtgaatcgaatatttgtcgctacgaaccctacgaactcctgttgctcccagaaaggggagcaacgcgcccaagctcatccaagcatgtcgagtgatacaccctcaatgggtgccagtaaacgcacatcagcaacttctggtctgcggaatatccagacagcgagacctgtttcccctcatacaccacaaccacattcgggaaacccctccttcgccagcagcacatcaccgggttccacctttcgaagcgaagacgatgcgatcatatttgagataggcgcacgatggctccgcgcaggctttgaaggaagcagcgcacctgtgtgtgtggttggctttggacctgaagactcgcggagagcgggggactaccgaggatggattcagggcagcagcggtgctggacggctagcgcagcccgtcgacatagaagagtggacacggacatatgaattgtggcggccagattctcgagaaattgatttgggcctggttgaggataagatcgagcgcgcgtttcgggagacatacaatcagttcctgttgacggatgcagggacatctcgcctggttcttgtcctgccgtctctcatgccacacccattgctgtcgtcattgctgtcgacgctctttagtcgatggcgcttcccgagtgctacccttctgtctagtgcgaccatgtcggccacggctgcgggattgcggtcggctttggtggttgaccttggctgggccgaaactacggcaacggcgatctacgaataccgcgagatgactacgaagagaacgacacggtctatgaagcatttgatgcaggaaatggggcttcttcttaccgggtttgcttccggaaaccagggtacggagactgtggataagatctctgttggattcgcgtactgtgaggaagttgttagtcggtttgcctggtgcaaatcgcaggcagaagaagatgaaaacttagatgaacccggcctgaaattgtcgattccttcgcccgcaaatcccgaggaagaatatatggacgtgccgttttcacgtctcgctgaacctaccgagaaggtgttattcgcaccaggtgtcgcagaacatgaattggacgacgaagaaaaatccttgcctttgcttgtctacaacacccttctctcactgtaccctgatgcacgaggaacttgcatgtcccgtattgtctttgtgggcggcggttctcgaattcctgggctacggcagcgggtccttaaagaagtctcgttcttgatcgatcgtcacggatggagtccaattcgaggcaaagcactagagcgacagcgacagagattggaggagctcagactttcggcccagaaagcatccaaccaacctgagattcctaagagcaatgtggaagcaccttccagcgatgacgaacccgccgacccctcgaaagaagtgcctgagattgatttcgtggaacaaaacctccgccgacaaaacaaagacatcccagtgcctatccaaggagtcttgcgcgaagttgaatctcttggtccatgggcaggtgcaagcctgacaaccagtctgaagatccgggggatggtagagatcgaacgagagaagttcttacaacacggactcgctggagctacaagagatattgaccatcctgttcctgatcgtcgatcgggcttgagatctggcggtgatcggtcgagttggacgcttgcaggctgggcatgaaaccatgtacatttttcaaaaacaatagataccccattggatttccgagccgttatttccctactgtttctctatatgaagcttcccaaataagatcgccgtgtttacgaggatctcggcatttaatcgcacccatcggttgaatgctggaccggattactttcaatctgaattattgggaggatgagattgtaaaagggagtggtggtaatgggggtagtttttgtcgaaattttagatgtctattatctgctgcacgcattgagggagtttgcatgtatagccaaattcaattctattatgtctgttttcggttgtgaattggccacaggtggctctcattcgcacagattgaggcaatgaatgccaaataagcgctacgcgtagggtccacgtagagatagatattgatccaatgcaagtatggttgcgcaccgtactatgaatctaaatagtgccaaactggtaggtagcccagttaacggcgggcccatcatcaggaccaaagatctggtagggaatacgaccccactcagggttattgataccatcgatccaatcctcggtctcgataacgaagcatccatacttgttaacatgggtggcaccggagtcaccaccatcagcctcgttgcgcttcgcctgcgaattcttagtggcgatggaaccgttctgtccactgcaggtgtagatctgcagcgcggcctggttggtagcgacgtcgaggctgatgccagtggagctggatgaggcactaaggaccgtggcgatcgagttagacgcgtatgttgagggccggtcgacgaggaagcacgtatcatagcctgtgcagccggcgccacagaggtcgtaggtcttctcgatgtccttgccaatgagtttgggactggtgaagtctagagctccttggtaggctttctcaacgtcgtgaatggtgccgttcgggattaagatgctgtctccaccaacgaatcgctgcgagaggggaagctgcaaggtggtatccttcaacacgttgggttctttgaacgcgttcaggttccagtatatgtggttagacagcatgatgggggtcttctctgtaagagagagagccaccagctttgaagtcaactggggaagacccttggggttggccggtgtcttctcggtagacacgctgaaagtagcatgggtaatgacgtctcctgggaacttctcaaagccttgatcgaacaaggtgaaggtgatagaggcatcgctgtgcgaagtgaccgtccagttgcgcatatcatatccggtgaagccaccatggagagtgtccacaccatcgttttcattctcaggaacgtggtacgtgttatcatcaatagtgaaggtaccgttcttgatacggttggcatagcgaccgacaaccgctccgaagaacgtgcgattggtttcactatcatgcaggtattccttggggtcatcgtagccaacgatcacatcttggacgttgccgttgcgatctggaactagcaaggaggtgagacgcgcaccatacggaatcagcttggcagtgatattctcagccttgatcgtataacttttgaagtgatcggagtttgagtcactagcaggcgagggaacagcctgagacggcgacggtgcagcattggccaaggcaggcagcccatacagggcggctgtcacataagacttgaaatgcattttgattcccaaaagagttgtaactgaaagaaacaagataaagacgaggaggagaaaccgaagcgtaattcggggacggcaaactgatgaacgtagccaaccgcggggtgcaggcatcttatgagaagctccgttcggatcgcaataaacattccccaatttgcgctaaactacctccgcatggctttgacgctagggggcggggacatggacagaaaccggggtaaaggttctagagagaccaggatttatccgaatgcaggtggtgtgatcgatatgcaggtcaaccattggactgttgggcaaagcggacgccagataatgagggggaagatctgagcccctattccggggtgttgggggatgtaacttaagggacgtgggtccagtcaagctcaagaggcgctctgccactgacggcacggaacaaatgcttcgctgagtccatgcggcaaaactccggtggagttcaaattgcatgttcaccgcccggagttgttagtcagcgtcctacccgtccacctttccaacttgggttagttcctgccgaggtaaccgtggaaggagcctctaaggttccaaggttcaatcacggggtaattccatttgatatgttgtttattcttaaggttggctcccaggaggaacttgccttaaccttatagacatcccagtcaggaatttatcaatgtcagccccgttctgagagttattctgctctcaggctcgggcgcactcacgggaagtagttggcgtccatctcacctagtatgtcgacgacagccttcgtggtataaatcttgacaggaatcaatccgtgagtgtgatatgttgtatattgtccagatcatctcatgctcagacaatttgagccccgggttgtgcctgttcattccctttgcaaatactagcaccttggcatagaaggggtcaaaaaagaatgtcctttcgtcagtcacactattttcaattccgccgtagccaaaacctcgtctatggtgatgtacgtgttttgcagtctcggcgtcgaactgggtgtagatgaagtataccttgtttgggccagccgctgccacgtatggagtatccggcgccacaacctgaaggccatatcctggcctttggtacgtagcagatattccccatggaaagttaatgagccactgagccctcgcatggtaggaaagcattcagaaacatggtgattaatggtagaaagagtatgtgcagtatagtcaccagttgaatatgtattgtgtctatttccgtgtgtccttctgcgtatgtttcttctctcaaataatttagcggtcagaggcacgtggtagataattactgtcccctccgacccggagtaccacgcctaccagctgcctcgtaaccgaagagcccgtgtgaccccaaattggaccccaatagtcatcctgcgcccgtgatcagccgcagaagtgttctgatcactgcgggccgacaattggctatccgcagtgggaccacacgcagtatgctggccctaatgacatcgatgataacgggttcaccatcgactttgggtttgctactctgtagacacctatgtacttgattctatctggaatccttggacttctatttccgttgataatagggacagaaaagaacacagaaattgagaccaagagccatcaaacatcagactcgaataaatatagtatacaagatactaccatcagtataccataccaactcatgtgaggcagagtaccggatgccatgactagtcggagggtgatgagtggcagcttcgacttcagtggggcttcctttctagtgcaggaacatcttcacccgggtgaaagttacacatataatcttatcccaccaactggatattgtcacagtggttccgatagggccgttgtgcagttcaccacacctcgtgctctagtattatgccgatgggacttcctttctagtgcaaggacatcttcacccgggtgaaagtcacaaatttagccttattccaccaaccagcatattatcacagtggctccgatagagtcgccttgtaacccgctacacctcgtgcttcagtattatgccggtggcatcctcgtaaaggcccgcagtatagtttccatccaaacagagcaaagtagaccccgcttggggtctatagtatgtaatgacaatgaggtttaggaatataataaggtcactacgatttcccatcattcctgtatttttttcactcaagcacttgataatctacaaacattcccagaacacacgttctttcatctctatctacaaggtaagatagcccttcgttgaagacttcgttatacattagatttaatgcatggccccagaattcagacaaaatggcaattgtggcgtgcaataactgtaccaagcacagagagtgttctgcctactcaggttcgaaaatgtactgcgaccggtgtgctgagaaacttgggttgaaaacagcgaaagttgaggcaacaaagacggaaaagaagaagtgacttactactactactgggtctatgttctggtcagtactattacgtctgatcgattattgattgctatgtatactaagtcttatcagaacatgattcagggcaatgattgacggtgttaggtgacttaagatatgaatgtgtctgttttctggtttggtcgttcaattgtttcaagattgactgaatgaactgtggctctgcatcgatgaaacggatgtcaatgtctgggctttgctagctttagatcagaatttcaaggatggagagtcgctcaagtttgtaatcttccagttcttgttttgctccataaggataagccatacatctcaaactgccaggctacgctaagattattcttggtgtagcatccagaagaccgctagatctacaaggtctctgactggtatagatcctgcgctaagtaaagaggtaaacagcgtccgacaaggtgatggcgagagaggcttgcttgactgggtacatggctaggcggactatgaacttggttgcatgtaccaactagacatgcaggtaagcccaatagttacctggccctccggtcaaaagaaaacgagtcaagatgcatcgcttcgaattttgtttaaacgactaatttcggtctatcactatgcggcaactcatctcactcgcctagtcagagataccacctgtagaaagtaggggatgtgggtatggttgatttactttgcagcgtaaatttcctttttccttccttccgttacatggtattgccatctttggaatatccccaagccctgtcaaattcattccaacctccagggggcgcgtcccacatggccaactcacgaaccactgtgtcgtagtatccatcgctgggcatgtttccctgacagacatttcctccaacagcgatgttgatgaggatcctgaactcactcatcttccttgtgccaggcggcttctcggccctcatgatgggcgtgccatcgatcaaccagaccaggcgcccgctgcccgttgtttcgtcctcatcccagataaaatcgtacctcacccctaccggcgagctaatgttggggatgggggtttcgagaacgcgatgcttattccagtcctcgccgttgaagttgccccaatgcagacaagtgtggttgacagcatcgccgttccacgcttccattatgtcgacttcgccatcctcaggccacttgaaggggtctttaggcagcagccaaaaggcaggccagatacctcgggccaccggcgccgtaatcctggccgatagacagccccgtggtcggctgagggtctggtgactcgacagtctggcgctggtaaacttctgggcagggtcgggattcccgtggttgatcagagcgcgcacgatcaccgcatcgccctggcttgaatggaatgagttatgcgggctgtcggtataattctgcgattcattgttgccccatccatgttggccctgttcgtgggcaaagttggcagataccggtacttgaggatttagattgggctgccagtagatctggggttgcgagtgctgttcctgataagctagtgggggcttgctagcggtcggaataggcggtgggggattgttgtacgacggtgctggctgagggttgtcgtgatggcttagttccgcccaagccttgtctgccttatcgataatgccctgaagggcctgtctgaatggcatgttgagtacgacctcggtatggatgttagggttgcacaagtagtgtacctaggcgccggagaaaacagtaagcaaagctgacgtcatgttgtggatatcccgaaaggatcgaattcctcaaaatcccctttcacaacctttcaacatcctacttggggaaatattgctcctttctgagactggaccgatctaatcagtggacacgttatgcctccatgggctagaccaagactcagatcgtatgaactaccacctgctaagtagttagtgcctcaggcaccgagaatatgcaaaccctacaaatctctcggagcatcacaaaatttcaagatcctaatatatggcctatcgagtgcgctagaacttaacgttagtcccgtcattacccattttatttcgagataatcaatatcattgccaacacgtgcctctctgctctcttgcaatatccccaaatatggcagaagcatgccatcccccgcctgcaacagaactctctaaagcagagcgcttcaaagctacgcacctcgccgcgcgccatggcaactaccaccaatattacgccaagtttcgggcacctaccgttccagacgagcgcctttctattctcccatcagatatcctccgcgacgcgcgagtcatagacctaggctgcaacgcgggcaaactgacctatgaggcgatagcgcactgcggcgcggccgccgcagtcggcgtcgatatcgacccgtggctggtcgagcaggcgaaggcggcgtacccggacgggccgtgcacattcgagcactttgacttcgtggatgcgtccgcgtacacgggtaccgcgctgggcaagttcgacgttgtcctactgctctctgtgaccaagtgggttcatctcaacaacggggactccgggatgttgacgctatttgcgcacatacaaagcatactgaatgagggcggctatctcgtcgtggagccgcagcctatgagcaattatgcgagagcttcaaagaagaataaagaattgagagagacgtataagacgattcagatcagaccgccgtttgagactgagttgaaagcgctgggatttgagaggatattggaagttgagagggacgaggaggggtttgccaggcccgtacatgtttggaaaaaaaagtatcataatacgatcaatggagatggcttaaaatgagtcgcgcgaattgacttgcaccgggaagacgtagacttttcggttgcttagtaggtaatcaggacgaagtatatttgacacagtatttactagagaagtgacgggttaagatttgttgacagggatcccagagcagcataatccttacatggttatttggagacgaacctgggctattttggaagcgagatgaactctttctagctacattggaacctgtcaacggatatatggcagcccttttttgcccaaggaacaggaaacagaaattgtaatcttcatatcacttttcatgggtttgataaaagaaacagaaatacatgagtggttctagctaaaataagccaactaaaaaaggttaaaagaagagggccctttttgatcaatctcttaaggaaaccgggccctaattgcctaacgagttcaggagtcatttgtcgtcttagtcgaataccaagtcaactcacgttgactccattccgcaaacttagattgataagacacactgtctcttcgaaaagcctgataattggcaacttctgtcttaagttcccatctcgagagggccttaaccatcaccagtgtccggtccttgtagcttttaacatgaaccacaagtcggacaatactgtccgtgtgctgtgatggctttgttctagactgaccaacgacgaaattcgaggcgataggccatccacagttggaagaaaatggtagcaagtgcagtggaaatgatgctcgcaattgacataacgatgataacgctatctttgaaatcttcatccatagcgtgaggagaggcgaggttgaaatgggcacatagagagagggaagaagaagtaagaactaagagagagaaaaaagcagccgaagccaaattcgtcgcgggccatattctatggttggctttggacatactttgtgctcatcataaaattcggattccagcaagtatcagcatcatgttcacttcttaatatgacataatctaaaatccaaaagcactattctggatctggatgtggtatgctttctatcatacaattcaattcaagaagcgattggcattgacattggcattggtattggccgtctgaaagtcacttttattgccattcatggtatttttcaagactcgtcattgaagggtctctaaccacccgcctagtcgtaggctagtaagatatcccaaatgcgtcgatccatgttggttgtggtgtcttcacggctctgactgggagactgtttaattgttcagattcccatgaagccgcaagtaacgtcgacatccaccacgggtccctattttaagcctagatcgggtgagatctgaacagccttatggtggtaaatgatctctacaagcaaacagagagctgaagcctatcaaacaggacaaacatggcagggtattcaacatctctgaatggcttcatagtggtcgatcaggtgactttataaggtgatccgatcaaccaagaatgggtggtatgcattcacaatagtacaaccaaccattgatcttagactacatatatggctttatttatgtctttttatggttttttcatctgcttcttcgtctaattcttgtactactttttatgtggttttcaaatagaaaatgtactagttcagcaccacagaaataccatggagcatacaatagcagagtattattgattaattatagattttgaatatgacaggcaagttgaagcaattttatctacttcgtaataggaaagttatgaattggtgtcggccccggcaactccggtcatagaagtggatattcatattctcgtgaaacttgaaacttgaaacttgacaaattggcaaaccgatctctaattacttcccaaagattaaacataaacacccttttggttgttttggtgacgccaaatctcaacctcaccaccaccgcgaatcaccccaacccgcatggaagaaagcaaattgtgggcggcattggagtgagtgtagacaccaccgttgaatatggcagtagcatccttcccaatggccgatgaaatgagggttttaccaccagggtgttccttgataaagtcggtcacgtcgtgaacaacaccggcaatggcaactagagctttgccactctgagcttcagcaatgaaatcgtcccagtcgataacaggcagctgatctagaggaacaccccaatcaagcttggcgcgcttctggtcgagcttcttctgtagttgttgcacacggcccttctcgatttcgttggctcggaactccttgaggttggttgccagaccgagctgcttccacatccagattgaccacttggtaggatcgtactgccaccattggatggcattgcggtagtcggaggggaactggtcagagtttagtggatgcaaagtaaatataagggaacaattttcttacctcgtggtggaagttgtggtaaccttcgccgagagtgatcagtgcggtaacgacgtgatcgcgaggggagttcctgtcatcgaatggctaaagcgtgtcagagcgaacggaaatatgacaagaacaggatatggacaatgactaacctgctcacccaaccaatgggcgagagaattgacgcagaaggtggcttgctgcacaaacgagaaccgaagaatgccagcatatacaagaccacccttccaatcaccccatcccaggccagcaacgagcatagggaacaacatcccgaaaaccaagatgaccgatccataatgcttgtgctgccagacgacgacgggatcctcgttcaagtcggagatatcggtcctgcctttgttctttgggttttggttcagaaccatccacataaaatgcgaataccagaggcccttcatgacgctgtatgggtccttcactgtgtcggtccatcgatggtgtgccctgtgtttactgctccaccaccggatcgacccttggacggcgccaccgccgacgcatgcaaggaatattctgactggaaggacactagagatatcagatgttagtcaatgcttcatccgaagcaactagggtgaggcagtagcaggcttacgcttcgtaggatcggtgcgcccacagacgatggtagccggcagtgatgcccagtccggtccagaagtagtagagaattgcccaagcagcagtggctgccctcagcggtgtgtagcatgcagcgatgaggccaccgacgggtacgatcaggatgagggttgtgttgacccagttgacatgctggtaccagttaccgagtgtgacaggcttctcgctgatatgctgctttccaccacttggctcgggtttcgccattgtagtagtggagacgagacctgtaggtctctagtgtttatgaaattgtggggatgggagtgatggctgcgagatgagaatatttcaaatttgcggaccctggatccagagacattatttaacataaaaaaccgtctagctatctcatgccaatgggtcaatcgtcagttgcgttgctcccagcaagaaagtgttgaaccgttgggaatgtcaggcaatgcgatgcttagggaatttctccgaactctcccaccccagccctaaaatcagcaccgaatgattcgtcattgctggacccattattagttaaaagattttccattttcataattgatgcttaaatcatcatcagaaatggggagtccgtcgttcgccactgatcggaactgatccactcatctcgccggacatgacgaaaatcatggaatccaacgttaagtcatgatttttactcaacggtttagatataggtatcgtatggtcggataatggtcaggtggtagactttgctacgagttgttagaagtccatggtagcctaggtgataacatatctaagtgatctagttacttccattgaacaaacgatggatgatatattttcaagcaaaacatacaaaacttactcatccggacttgttttgtttttgatgtccttgtttgtcgggccttcaaatcgcaagccatttcctgagcttgtatagaacttcggattttcccaacatacaggatctagttccatggcgcccgatatcttgcgcacatacacgcatgcggttgttaattaggctcgaaggacccctcctaattcccccgcggaacatcatctaatttgatttaacacataattgctcgcacactacctatactccgagatgcaagtggtcgaagtgaagaacaagaatcttctgaactaaagatcacagttgggcgacctgacgtggtgataattccattctacatctcgggcaatgtgacaattggcagcaaacctgtcgaattgaaacggcactaccatacaatatgtcctttgctgatggaaagggaggaaggaaaactaggagcatgggttttcaagctcggataatagtaggccttctctgcccttgattaccttgatcaccacggagattgcttttcttttctagtttacccgttgaaatctatcctcggcctactttatagccttgatacgtattataggccctaggatgcatcgaatgcgcttcaagcgtaagcacgtgatgttagaggcccctcgcctcgcaccgcctgcgcatattccctttttgtattgttcacatcaaatactttttataccattctagaagccagccctggctttgaagcagcgatggaaccaagccacgagacataacaagcaatgagatcgcaatccacgacttacgaggaaaagccaaagaaagatacccagcaagcaatcagttctacgatttcggacggagccgaacggacaattcgatcatcagaacaagatcttgtttcagaacttagatccgacagggaaatattgcccatttcatcttgccgtcaaacaggcacgttgaacgcgtggttgtggaatggtccatagtgagtcctaaccatacctattgttacccattcctaagtatcgatagatccggtcaaatatagaaagagtagtgaagaaatttcaacggaagatttctcctgacccgagagcacatctgttaaaatggtccgatatcgaccactcaaatgccgcaccatggaaccgtgagtcggggtatccggatgacaaaacgagcataatagtctggattgcgttgggaaagcttggtgtagataatggattcatatatgaaatggagagtggccaggacatgagtctagatggccgtgaggggatacctttttctggtaacggaggggggttggcagtgttgttgttattacacatgagatgtgacattaattagaatatttggacctggatatggtgaactaacccggcaaggaatatgattatgccccttcgaaaatattagttagttagtacatactccgtaactaactaatcagctttgatttgattaagtggggatcacgtgaattgtcggggatgagcgggaggctcaaactctaaagagggttaggcccaccttcccgctccccacacttgttggttcggtggattcggcgctttgccgaaggatccagaagcgaagagacagagacacgacacggcctggatgatattggtcctgaaaagcggaagcaaaggatggaaaactatcaacaatgcgttcactcctcaacgctgggtctgagactaccgcagcgctgctcggtgccattacctttattttgctcaagaaccccagagtcatgaagaaactgaaatgcatcaagtcggctatcttgaatacaatggcatttgatcggatcgaaggtcgcttaataattaccaatatctttggaacagctcatgggtaagcctttaatatattgggtgtgttggaatcgattgtttgctgatcatatgcataaaggcaatttggaaataaaattgttctatccgccacttacatgtcgaacctacgagagttggttgacagggattgactccaatgccttcttgagaggacgatccgattcttgcaacatacggggtctggttcgccatccctacaagctgatatggagattctcactgaaatctacggacatatctttacaccttctatcggttcataagcgttagagcagccaatttggttcttcgactgcgctccttctgagtagtatcggataatttctttattctccacgatatttggttcaaacgctcgaagcacactgcctgtcttttctgattctctgttttcgaaaggccaggagaaggaagagagaggagggactacaaatgtattagactagtcgactgcactctggaaaataagagtcctggcaagtagggtcaagttaccgcaaccatgctcctaaaatatgtgggctctatcagatatgttacatgactaccctctcattctacaatactagatttacactactagctacatcaacagttagggatatccgagagttgacccagtaaatgataatttagtaacgaagaccatcgagttctcaaagaaacaagaatcaacatcccgcacaagcaactagacagtgtcacgccaatcctcaaactcccgcgtcgtcagagggaagaccgcaacgttgctggacgtatctccatcgtcccctttgaaaaagaactagacggcgttacgtccatctttagttttaagaaccatcctctccgcgacttcatctggagattgcatattgccgaaaccataggtcggtttgccacaaatggtgccaatcacaagcttcgccagttgatacttgcggagattagacgggaccttttcccttcgtcgacaagttaagataagcgacttccactctgcgctaggccaataaatacgctggatatcgggtgcagggagagactccagaaccgagttcgggatagtgatgtgaataatgacagtcgcgctatatatgctgcggcgtttagcatagtaggcataatattcggccacttctcgctcaaaagcaaagtaaatatctgcgtgtcgtcccgagaaatcagtaggtggcgcggatgtaaggcatgaaaagtcaacgctgctatcattgccgaatagactatcaatctaagcttggtcaatacccttgtatagagttttgtaccccggtgcatttgcagctgcacttgttacagcgggagacaaagcagtttcgtgtgacaaccaaggtaccaccgatatcgatcgtcatccaggtctggaagcttcccgctgactagccatatcacgcctacgagaagcttcttgtatcgcccgtagcccccggtgtcgtaactgaatagtgtcctgaacccagaacttacaagtttcggttagacggatatgttgaaacttaggatccataatagcctcctgaagctcgcggttgatgtgggggtcagcgggagatgttgttcttcttcgtcgctggatctattcaagcgtcgtttatgaattcggcgggtgccatcatatagaggagggctggccagccctgatgcctgcagatttaccgcatcgtcaggggtcagaatacttgcccagtcatccctggatataaaagacatcgtggattttttatgcgtggatgaatatgtatgtagtgtgagattccaggtcgttcttgaataagaaagagtacatttgactaaataaagaatataagaaactatctgcatacagcataatggggatcatgtgacaccttccagcaatgaaaatgccttcaatattggaaagcatctactactaagcctaattaggaagttatagctccgtgaatataatgagcccgggcgcgctcaattaaagcaattggtcaaaagtttataggaaggtcaatttcacatttgtaaaaaatgagagagaagaaagacaactgaaaagacatatgaaaagactaccgcggcaactccccggggccacattgataattgtcagatatctagtgttctcacctcaacaggtaaccagccctcacatttttctaccaatactgctttgctactgatggtattagataggaaacgccgagatgtataagctcgaggttagttgtgggaagcatggattagatggcattttaaggacctgaaatccgtggattggcagcccacttcatcacctcagagttaataattatttctatactctcatatcttaaacaactattcaatttgagacaagatacgcgatagaatttgttggacccaaactatgaatacatccaatgtcgacaaatcaactatagagtcgcgttggcttcggctctttgccacaatttgagccaaattcgaagtctcgaatatcgccagtgaaaagtggtatctgacaacttagtagcgattacaatgacggcagaatcacatttctgtagccagctatacatgtacctgatacgccaacacgtattcgaccacctctgcacgctggaagctgattcgattcatgcgcgcagcgcgaggcgcttcaaggaaatggttctttagggttcccaagactcactcctcagcatcaccaaattcatgtccgatgaagatggggaaggctccttcacccgaaaaggctggtagtgtgacaatgcaaataatgtgcgcagtatgagttgatcaacattaatatatgcgtacaataccagtaccctatacgggttatttaaatatcatcgagactttggctttgggttggctgatatcacctatgggttggtcttgtccgaccgccgggttttggacgacgtgaatacacaaatggtagtcttgccggttgtcatgggccaagacgtgccgcgaatgtcctactggcatatcagaggaacaaggtagtcgggaatctccaaggaagatgtgcaaatgcatctggtcgttgaagcttgcggtgtaacattgaattaagtgcccagtgtgaatgacgtcgatttgtactccgtaaagaattgggtcgatggcaagccgaggaaatatttcctattgtcacatctccacttatgtttcaagacacaaagggggaagagaagatcgtgtccaataatagaactccaaagggttgtttagggagatgcttacctaaccacctcgaggaccgctctttcgtaccgcatcgggagacttgtttatggcttgccccgcgttttctctcttatttatgtatcataaagtaggcctgtgaatagttacgagacgactgcactttttcattgttgcattccttagcgtgcgctcttccacccctttggtggcacgcgtgcctcccgagattccatcgcatgagtccgccatgtcggcctcgtcgcgcagccagagctcctcccccgatatcctaggtcctccgggcgatgcccagtacttgatctcatcaccgatcaaaccattcgcagggcgccaaagctggatgtctcctatggtagcgaaatcacggactccggccaagcgaccgcgaccgcgcggtagcctcagtcccgcaaaaagcgcgcattcgattcaattcaaagatgtcatactccccgggtcgccagcaatgaagtttaatggtggtcgacaaaggtcactctctccggaaaagcttcaggagggaaatgtcagcccatggcgcatccgactcacgctggaagcgacacaagacgaagatgacgagaaccggggtagcccgtcgcgcaaacgattaaagccctcggccataacaacgatgataccattaaaggatgagaggagtccattgaaggagaaaacgcagtacaagaggcgagggcgtcctcgaaagtctgacattagtttgtccccgtttgctgcgcgtacccctcgccctggacatacacctgggccggggaatacacctggaccggggcatactcctggaccacaagctggtgactctcaaccacgcaaaagaggtcgaccacggggcacgcccaggcccaaatcacaggatttccagttgctgggtgaccaagcaacgccgactatcgaatatgaccaccactttagtccgatggatatcgttccaaatagtgatgcccgtcacaaccagcaattcagtccaatggacaccacgaccaatgaaactggcttaggccagcatgaatacagtccgatggatacaatacctagtgatgctagtctgggccaccgaggattcagccccacagatgccctcactagtgacgctagccgaagccaacaacggttcagtccgacggattcgtttgctggaagtaatgcaaacgccagtcccttgaatctcataggggatgtggaatccgatgacgactcttgggggaactcggagatatcaaatgcagagcttctccatccaacagaacccaatctcgacaatactcgccgtgattacggccgaacgagtttggagacacctgttatcggagctacggaacatcactttttggatgatgagaatatccactccacgccttctaaaatgccatcaccgacacgcgagagagctatgttgtcatcgagagcttctcgtaataccaataccgctagcccccaatcgcgcacatatcctactccgacccccacatcttcgctagccgatgaagaaaatcaaacccgacaagccgactcggatcatttcacaaggacggagaccgaccatgctgaaaccgatcccgttgaagatcccgcggacgagtacgatgaattcgacactatcatggaaagtgaaggattcactatgatttcccttgatacgctcccgtcagccaagcagcacggattcggctccagcgctacgacgaacagcggtcccaaaccgaaggaagtcggagaacggttgagacgcaaacttcccgggacgatccaagatcttcgaggtgattctcgtgctgaaaaggcatccagtccagtcactacgggcctagattctgggctatacaaaattccaagcacccatattccggagaagtacactgcacatgcgatcgagcggcaatccgttaactacgtgaatgagatcgcctatcctgagctccctgccgcatcgtctcctgccaaatcaacaattgttccaaagaagaggacactcaccagtttggctaaacttgttcgacttagcttggccctacaaggtccctttaagccgcaacaagacgagtggtctggtaagagtaatgcccgtcacaaaagacgtcggttggagggtgtttttagcacattcaacgctgaaacgcagcgggaactccgagctgctatggggctaggacaggagcttgctatgcgccggatgctcgccgaggaagagaaggctgcggctatagcagcagatcatgcggctgctcgtcgtgaggaggaacgtctcgaggaagaacaaggagaacaggaagaacaggaagaacgtcaatataatggcttcaatgacgaagaatcggaagagcaggatcaggatcgaccctttgaagacgagatcaagaagcaggagcggtacatccaaccgtcacgttccagtctcaacaacttcattcagcaaagcccggtgtccccccagaaggcacagcgggaggcacaatggcagcttgagcgagaagcagtcagccgccaggctcagacggctgcaaactcacaatccgtcgtttatattgatagcgatgataatgcggcggaagaggatcggggcatcgaacctgaacatgaacaacgatttgaatatgagaacggaaatgagtttgatgaagagcacaacgattctgcacctgcacccgtgccagaaccagcgtcagaaccagcgccatatgtgccccaagactttgagcccgagcccgagcccgagcccgagcccttggaagatgaggatgatggttatgacgacatttggcaacttgaagcgaatgatcacagccatgtctcacaacacgtcgaggatgatgatgtccggtctcatccgaacccgcttgcacgtcctttgggcaatattgccccgatttccgcaggtaaagactacctgagttcatctccttaccctacctcagagcagaattatgtagcgcgcttcggaccgtccaaggtccgcgagctccgtgagcaaaaggtcgatttgtctgctttgcttgcagaagaggatacaccaaaccgcgcacggtattacaatggaacgagtacgcctcgtttactcgcccgcccgtcagggacacagaattcaccaatcaataattctgtcatgaaggatccggtatcgcgcactccagcgcgcattcgtttacaacctctctcccattccagcccggatactcccaacccacggatccacagtccacaaatcgcgttacttgatgggaagaaatctccgaagcctatacaaagcccgcctatacaagagcagttggaagaagactacgacagcagcagcgtttctagcgccgctctcggtcaatcggaatctgccaacgtggattctgcctccaccccgcaacctcgtcagctcaacaaagaggagccaggatcatcctggttcagtaaaataaccagtttcaccccgcaatggctgaaagccccgacccgtggccgaagctcgagtgttagtactattccggaggaagcatctgaattcgaagatgaagaggaaatggccagcattgaatctgcgaaggagcttgagggacatctccaggatgagccgctctcaaagcaaacgagccaatcaccggcgagcaattggagacagccatcaccatcccagtctccccagatccagcaagatcctcatcctaccgtggaagaggaggaggttccgatgaatgagagaagtgtttctcgggacctccgagaagaagagcagccggtatctgggcgtggtgtctcgcaagatccattagagaacgaagatgtagagccagtgaaccaccagaatggggcatccccagggccacgaccacttgctgtcttcggatacttttccgatgagcattacgccgcgctttgtcgtatctaccgaattgccaagcgataccccgagcactttgaatatcacgattctccagggcgggctgccatcatcggtgattggatatggacctccgatggtcatcacggggtgcccatcacagagattcaatttgccattatcgatcgctttgctcaggagcttgctcgggctgatatccaatatggtggcagcggacagatcgattggacagaagccgatctgcatcggagactcattagcatcattattggcgagcagatccgagaggaaagaaaggccaaggccaaccggggtgcttctgtggatacatggcgatgaatgtatatttcttttgcccacttctttttgtctcatgtacattttttggatatccgatgagcatttggcgtcatggttttgttttgaatacgtctgttcttgttatgattatgattccctcacggttattggttaggcttgtgtgcagcattgggctgttttggagggtttattgtgcccgtaattactttaggcgtctttctctattctctagccttgtcagttggacatgaatgtgggactgtatacttccaagtttgaccaagtgcgaaagtaccaaatcccgcaaggggatccttgacttcaactgcgaacaccatgtgtatattgcatctggagcacatggatccagccaactatggaggtctgctgcatcgagatcccttatttccccgagtatctgacagagtagggatataaacattaatcgcatgagttgagctcagtccaactcattgtacttccttcgtacccgctagtcaacgtcagcgtcaatccaaacccactttgtctcctcctaatgaaacaactgtacaaccaaaccctcaaactgtcaaaccgtcccagaagcaaacacaatctacattgaagtcccgaccaaccctgcagtcctccgccatctagaccaaccacgccaacccgcgcttcctgcacgatcgtatacttctcgcgtgggcagccaagcagaagccggagagcctcgcagtccccacctctgtgcgaggttcctgcgaggtgtccctgcacgggttctcgcccttgagagtcggtctggctagatcgcgaagtaccacatgggaggcgacaccggaacatttataaaagcaagggttggtagcagcgaatatgggcagcagaccgttcccagagacgaatatcaagtaacgtagctctatacgtcgctcatctcatctattcctttcccatacatatagtctatgtgtgtcgagatcccaaccatgtcagtcttcacaatcgtctatcgagccctaccaccgctaccgctcccctggaagcgccgaacaagtctgaaaggcaaatcccccgagctggaaatccatattgatgaaaagaatcccggctcctcagactccgacatcagtccccacgccgaagaccagcacaatggaaccgtcttcatgcaccgtgacgtccacggccccgtgcaggtagcggtgaagactcacgcacaccacaacgcacccaccccccaatcactatcatccacgccggacaatatcccgggaccggcgtcgggcccggcttccgagtgccgggtgcactattccagccaggcgcgtccgacgcgcgcccagcttgatcgcgccgttagttgggcgagtattatccgcagtcgggaccggtggacggccgagcaggagagggagcttgtgcatgcgaagagacagctggggaggtgtcagaaggcgtggagttccgagcaggaggtgtggttgacctatgtatgttggcgactatttttgctttctttttcttttttctttttctctacgttactattgtattgttccatgcaatcgagttcgatatcacatttctgagtctgagtcccgacaggagagataacgaactatgaactaatttttgtcggttcaggtccaggccctcagcgaagaaaaggaggcccataatgggtttctgtctatgcggcacagacagcaggacgatgaacagcaccagttccgtaaggcgtggaaacggcggcgatcttcgtcgggtgatgatgaggtgcagcagtctgcgatcgagactgcgaatcgattggggaggctacgtcgcttgcagcgttatagttattcagggcaacggttgggcgcgacgggatcgacagttttggctgtggagggatgatttaatgacgacatggtttctaagtgtagggttgaaaagatagaggttaatttgtattgttcacaattctggagtattctaattagtagttgaatggatagaatggactggcatatctaaatctagtttcatatcatatcagtatcagtatcagtatccaatatatcagaattccctagacatactctcacaaaccccctagcgatacaaacctacgagctcttctacttcccatcaggccacttcctaaacaaatctgccaacaaatccaccggcgccgccagaagggcagcagcactctcgaagaacggctccgtaggcgccatcggatgcgccctcgacggaacaaacatcttaatccgatccagcgacttcgtcaacccaacactctcctctttactcagcaactcctcaagcctaggcagatccacatcctcctcatgtctcgcatgaataccgaaatcgcgcataaggccctgcagcgtcggcacgaagcgcgggtccgtagacgaaatatcctggaacgctttcagctggtgcttgacgccatgatgctcgagtctgtttttatcgacgatgccttggccgtctgggagggagtcgatcagcgccgggtagacgacgagttcctcgccgacgaggtggcgggctagctcccaggtgaattggttttggaagcgggtttgctcgtctgggtctgttgagatgagaagtttgcggctgtgggcttcgagttcgaggtggtcgtgttttatggcggggaggatgcggctgtggaagtttggggctgcggcgtcttggctgaaggcttggaaggttggtctgatgttgccgcttatgaggggattggcggtttcggcttttgctcgtcgtgttgtcattggttttgggatgggggtgtggatggcgagggcgcgccggatcatgaagataagatagaagggtagaagggtggtttggtgcttgggatgttgttttgctgtagttttggaaatatctggagaatccgcttaatagaatagttataatagtcggtgatgagttccgtttttgtcatgatgatgaggtggatactagccctaagtcgatatcagtatagaacatcagccagtccatgccccagttgaacctactattcgactcctggatagtatatcttgggggagactcggagttgtattgaaggttagtttgatggagggaatccgaggtggttgaaggcaagatagccctaaagggttgccctcaagcctgtcatcgacacaattgccatctggggaagaaacaccggggataagctgcatacatcctcctcgcgaatggccgagactatgatatagattgacaaccgcctaaaaccaagttacagacttgaaaaacaaggtatccgtgtaaattgtactgcccaacataggggcaaggaacctagaaacgaagtgctatgcgtgttccccaacgcccagcggggcgaacatcagtccgaaaaagagaaaaagaaaatagtcacagaaaaagaaaaaattcaaatcccaaactcctccgaggtccatccctcacagcatagctaatatgatcaataaagggtaatccatgaccgcgacctgcggtaaacaccatccatcccatcttaacgtacatccgaaatttcatgcgcgtatccctcagtgattgcgggtacgcttgcgactgcgctcgcgttccatggccgcaggctggaacatctcgtagcccgggttgtagacggtaggagtccagtcgacacccattggggccgcgaaatccgggtgcagttggctgaagatggcaggatctgacgggtgaccatcgacctcctctgcggttggaagaggtgccgccacgagttcgactagagatgtgtcgatccaattagatggtttggcagcgaggcggctgatgcgagcgcagtcgtcgtcaacttcctcgttcatcagggcagtcaatgggggcgcgttgccgttgggtcgcgcgtggtgattggagaggacgtggtaggggaggatcgggcgggtggcgggcttatcggccagatcagccagggcgctcagagcactgtgcgcggcggttgtgcgggtagatcgggtagcatggaaattgtgactagccgtgcgcatcatatccgccgcacttggggtgccgttatcttcgtggcctgtgccctcgggtgtctcatccgcgtcggtattgttaccattcgtcaccgcgccggttccgtgatctgggcgcttggatgtagagaagaaatggacagccgccaggtgtgcctggtttgcgtgtgcgttgagttccttgtcggtgaagagcgagtgaatcgagtaggcgggtgccacctgctcctttgcggcctcggtcttgttgcgcttcgcgggggtagcatcgcctgcgtccagcgcaggcgacccattgtcctcgtccggagccttccgcttgcgcttgtgcaactcggacatgaaaccgttgcccaactcgtcgaggtcaacgcggtgacgggtgtgccgagtggtcttgcggttgccgtggataccaccagggctggcagggttcgtgatactgaactggttggggtggaggaggagggcattcgtgtcggcaatgtcgagctgctccttttcacgcatcagacgggcgcgctttccggagatattctgcaccaatcgctctcgaagggtagcagacagatgacggaattcttcttgagcgaaataagtacggaaatcacggtcccgctgttgtcgttccatggtgttgttgtagttattctgtataagaaaaaaaaaaagtactgattagcgaaaactccttatagatgagaaaaataagcaactcaccatggccttaaccaattctgcatccctcctctccttgatctcattaacatcctgcacaaacctggaataccaggttccagcgaggccagccatctctttcgcaaacttgctgccgccgccaatcgtctcctcaatgagcgaggcaatgctctccgctgagtccgggagcggtcccgtcacgtaaggatcagcattgttgatcagagtcatgtcacactggagggcgtgcaactgctggcgaaactggatgtcccggttattgctgaactgactcgtcaattcctggagccgctcctggagcgcagtgcgtcgcttgtcgcgttttgagggtgcgccgccagccccgccgccagggctgaggggcggagggttcgggtaagacattgtatgtggcgaaggtgggcgagaaagagtggtagatggcattaagttggtgaaggaagatgagatgggaggggtggatcacggttgaattgaacggcagaatgtttggccgccccggagaatagacagtgaggtaggagataagaagaggaaagggatttcgtactaacttaagagaagtatttggaaatataataggtaaatacaatggattcgtatatattatccgttttcccattttctattgttgtttgttctgatatgttcctattgatgttcctactaatgttcctcgcaattgatcacagctattgtaccttggatatctatcggtaactaagctagcgaatatccggcaggtaatactcgaaaatcaaagggactgactgtattcgacatatcgaaacctgcatactaccaatccatgggctgtatacggcgtgaagaccaggaatagagttcatcatcgccatacaaaagaccagtatccgcacctgggtagagcacctcaagttcatctttaacttctgtgcagtttcagttgagagccacatgtatctctccactcttcccgtattcgctaggccgcctccatatgtacctggagttttttcgtgttcatttccacagggatattgcccatacccgatctccatgtcatagtagctgacagtgtgatcagtgagatcatctctaggctccagatcagtctgtaagcctggtgaggcagtgagtgatgctcgggggccctactatatattaaatttagggctgagagcaccattgcttggatattaaactattttgaatctgtaaagatactgaattatataccacgctacttatgcgcccagaaaaacaaagtggaggtgggtgaatcttcatagggtctatagggtagactgttgtaactagtttagtagagacttaaacatgatcacagtatggctatctctgtattagactcgcgccgtgcaccccgctctggtcaatgttgctctaaagtgaggtattagtctcttttcccctcgaataccttgctctcattcgctaagaaatctgcactggcctgctaagtgatagagttcccctcttttaactcaaactttccgacgcactcagctgtatgtacgctgtcattctcgagccctggcactggccttaaccaatgatgctgcgtggtgatacctgaaggagattacgtgttgatctatcccccaaatggtgagtgtagtatacatgagctgagctccttcgagaaataatcaaataggcgcacgctagtgcacaagctatcacaaccctagagatattttcaagtcacagccaacggactttcagctgtatgctagaaagcccatcagtatgtgtggccgtggacagagccgcattttgagcctagttcgtaggtcaggagcccccttttggatcctgtcaagatataaatagggactgggttcccatgccgctttctctctaatccagtgcccctaagagcattttgtcttcggtggcttttatatcttcattggacatatcgccatacctccggcaggacttctacgcacaatggcgactctaattgtggggctagcaataaccgattcggggaaagcggcagccgccaaacccgttcaggatgtgtctaactggttgaggaagtggcggggactagtgccattttagggatggagcggcgccaaattgcatctggccacgctaaaccggaacgggggccgatgaggacgccaaacccgatcgaggggggcgtcggatccggcgccgtcggcacaaatggtagttgtccgcaatgaaagccatagaccaagttatgagatgagctatagttaccatgtaatttcggtgatgcctaatgggagcctaacgaaaccataagcatgatccctgcagatacggagtacaacatacatattccagtgatatcctagattacagaaaagaatgttgttaatagcagatatattcccactaaatcgtgtatatttatatccatcatcaagacaagaaaaaaaaaaaggtccaaaacgtcatataagacccgaatcgccaacaccggggtattcatagttcattcaaaatgttcacgcggggaaatggaacccccaaacgagtaatgcaaggtgcgaaaatattacttcgcaccggaaaatcgaaatccaacaccggggacacctccatgggtcccatgtcatcttttgtcaaggccgtgtgttaaaatatgctattggggaagaaggggtggtggaaatgaaaggggtgaggattcgaaggtggggattcgaaataggagtcgaggaaaaaggaggaaaagcgatctagcaatgctgcgatctaattcgttcgacgaatcacaaagacaccaagctcgataccatcacgaggctcgttgtcctcgttatagcgtcgtttgcggatgccgtcgcagatttcacttaggagcccggaaggtgtgacttctttattgcccatcatggagcaaccggagcttgtcctcttagatgcacggcggccgttttgccagtacagattgaggagttccttcatgcggggcttttcctggtggatgaaccattcggcccagagattgcggtcgaggtgggtgtctccgcggcctgcatcggtcacgtgaaaccgggaagatgaatcgttgtcgctcaatgattcacagagcgccacgatgttcgccttcatggtggcgaagtcgtccatctgggagacggatgagagcttgccgaggtagcggctcacgtctgcggacaactcattcaccaccacgagttggcggagaagggggtcgaggatggggcccaagtattgggacttgaaggttgatgcacctttcttggtcgggtacacgaagaggagggagccgccattcggtgatagctcactcagacgatcaacgaggaaagacggacgggtacggcaaaacaaatcacggtactcttgggcagaggttggagggagatagcgctcgaggactgagatgtgaacgctgcgaggggggacaatgggcatcggagcgtgggacatttgccgttggaggggtccactgtagtcatggtaagcacccacaactgccgcactggagaaaaccgtggcgttgaagtattcctcggcggcagtcggagaacgaggagtgctaggaggagagtgaggcagattcgaaaggctgaattgctccggtactgcgtgggtgacgttgatatagggtgattggccaggttgcaagtggttgtgaactgcctggaccatagaggtaaaaacactgtcggttttcggtactgacgctgcctgatcagatgtcctagggtatggaagagtctgggaaacgattttgacggcctcgccgcctgtcttgcaaagggcaagtgatgaagctggaaaagtcagtgaccggccctgcagtatgaatatgtaaaaaaaaacttaccagtcaagttgataccatgatccagccatgagccaatgtcctgctggcagtccatatcatcgtggggcccagggctgcctccagagctggaggatctcccatctgatgggctgctgaatgtgtccgaagcaccggtcgcggaggaattgtccacgctctggttatcgtccatcatagccatagacctcggatggtgggagtgcgcgtcaaacaacatcatctcggacttgggattccacgcaacgtggatatcctcttccggcggcgtggggggtaatatagcggggtattcctgataatgcgcgttccaagacggcgacggagccaaaggcctcggcccgcgagacacggtggttgaaagacgaagacgagagtcgaccgaccgagtgcgagaatccaaacggtacggcgaacctggtgaactaggcgaggaccgttgatcccacgatgggaagttcacggccacgctactcttggagagaaagcgagagaccggtgacggtcttgttcggagagacccctgtgaagctcgtcggcggatcctcccggggttgaaagtttcctgtatatctgagttctgggggaggtgtgctctggtgtcgagtttcactgttggtgggacatgcatggtgtgatcgtcaagtgtgggagtgccgggccagtactgtgcattgcatgagggtgtcatccagtctttgttatccgggcgcagatggcagcggtcatgaatcatgcgtcggatgatcgaaggatgaccaaaagatgatggccgggtccgagcgtgggagtggaagttggaggttgaggcactgaagagatcgacgttaatgagaggagggaggggaaatgattgagtcttgttaggaaaagaagggataaaagagaagaagaagaagaagaagaagcaaaagagggcgtgaatcgaatggaaatggacgggaagggaaaagtgggtaccgggtatagtatgggcgaacaggcactagaccaagtaccgggtaccgactggggcaagggctggggccagactcttcaggtcgggacagtctagaccgtccaagtcatggagtcatcagtttccacctttttacgttcgtttttttttgctgtaagggatattgaatttatatagatactattcaatacccttaatctaatagacgtaaattatcaaaaaatacaacgcccaatagcgagtatgcagcgtggaggacaagtataaaatatcgccagtctaggctttcgtcttggctccacggggctgacgatcattttcaggtggtgcaagtcgaggccagaatacctgaaaatcacaggatccgaatatacttgatactccagatgacactgcaaatgaattgctcattacccgagccagactcgagcagctctcttgcttcaacatatctcttccctaatgcggcttaagccttgggtttcacaagtcgccagtaccatagaacgcatgtggagcctgggcctggacgaggtactgaggactttgccagtgtacgcatacgatattccgcttccggtgagttgggcatcggcactcatttgccaacgcatatcacatacataaaggctatacacatataagcctaagtatatatatatagatctacgtctagcttctatatacgctagttcgcagcaagttcgcagttggaagaccctgaattcttaaccctggattcggggtggcaccatgacaggcaaccccatacatttcagattcagatccagtccagtccgatctggacgttgggaccgttttataatttccaccgtgcgccccgatctggttcacttccctgttcccatctccggcggactccactgtctcacctagagtgttgccactattaatttgaggtgtctgtccatctatgggtacgaattcgcaatttaagaatttggcatccgtggatgggacggcacatttcggtttaatatatataaggacacgtcagccgatattacttgcatatgatagaagcgcttgaaataagatgattaatattagattatcatatcactatgtgcactcgacatgatcaacaaatcacatcatcccggccatagagaccgatcgccgacgcattccatggaatatctccatcgccccgaggcgatggttacttcgattatccacggttccggtcccgattgcatcaccacagcggactccagatccgcgcagacccttgcatctcgagaatctggtctcggtcgcgtgcaacactggggagtgccatgtgtgagagatcggggaaattttcggatgccaatttccgatagccgataggctctctggacgtagattgcgaaggtccgtagatcctttctagaaccccgaatggttcaaccagcaaaaggccaacctggaaaacagccccggtctaaaaccaccgggctgagagtaagaggggaaaaaaaaaatgcatatggcagcagtcaccatagcccaacgaagctcctcatgaagttagcgaccggcgccgagactgagtcgcagtagtacagccggccagcggctgtctcatctcctgcgagcaattccgcagcgaagcgcggtatctctgctcctcgcgcgtcagccggacctgtttccgcgcgaaactagacggcttcagggggatggtggagcgactgccgtagataggcatgggggtcttgcccagcgacgggttcacccgagccgggttatcgagggtcgtgctgagctcgtagcactgccggacgagctgctgcacgccgtccgtcagacgggacgcgcgctcctcgatatccggccagaaagcatcgccccagaaggggtcttcgcagacagcggtctcgagggcgttcagccagcactggaagccggaacgcgtgcccgcgagctgcgaggcgaccgtgacgaagcggatcgtcggctccgagtgcagcacgtgctggacgatgcacgccggacagcgggctgtgaggtaccagtcgtgttcctcggtgaggatgcagttcagccaggcgaaggcgctgcgggcttcgccgcggaatgcgcgttcgggctcggcgcctttctggctggggagggtgcgggcggcgatgcgctcggcttggtggttgattaggaaaagagggacgaggagggtgtggatgatatcgcggtggagacggaaggtttcctgttcggcggcggtgcaggcgtggcgatggccggcgcagaaactcggtcgctccatgccgcattcttggcggcggagctgttcgcgcattactcggaaggcttcgttgcgctctagctcgacttgctcgtgtcgagagatgtggaacggggaggccattgtggatggggactccgtatatcggggaatatggttctagatgattggatatgatatattatagaatcatatcgggaattgataaggacaggtacaggccagggctgagttcaagtagttccatcagagaaaataattcagggccacgaccggatgcgggcctggatattatatggtctgccccccctttgcggaaacgtcattagccaactgtcccgtttttggggaggccaaatgaaaagcccagacgatcccaatggacgactccactagctgacgaacactgtgcgtacgacgacgatcattggcggacatctcggaatgaagtggaggagtggagattggagagtctggccggtcgcacatccaacagcggttggggatgttgactccgtatactcctatagatcgggagacgtaacgtccctcacatggctattacatgattccatcgatattgacgaatgcgtggtttcgttgcacgtcaaaaagaacctccttatctcgccatgaccgcgttctagcccgagtcaccgctaaaaaccgcccagtggggtaacgtggcagtctggaatttcaaaagacttccaggatcgcgttggcgttgtgactagtgatattcaaagttacatgcattaggggtccacgagacttatcatccctgatttctagcccgatctctgcccaagaagaatataaaaaataaataaatgcagtaatgtcgatcgatgaggcaagtattcaaggtcggactaggactatctttcctatgctagcaagagtggatataagggccaagtccaaaatagcagtgattgacagggtttacgatggggggatacctgtccaacatggtggtaccgaggacggagcacagtgatagtgatgataatgatggtctgtaaatagctatcataacatgtctcaaacctcaatatcgtggttatatatagtataggggagcgtaactatgtatggaactcggtagattccgggttaggggcaacattaggggactcttaattttaaatccttttgtactggagactgcatatctctaccaataactatctattatcagtacggagcacggaggactccgcctagattgactccatagtgagctactccagatatctccaattgcgtgggaattagggctcggccccaacagctatacaacataccctcgaacaatcacaacatggcacttgtactcgggtgtatacctttcgcacttcgtgtcaacgtctatatcacattgtacaccctcaagcttgtaaaacaaattaattggaatgccccgaacggggcctggaatgaagcacgctagttgaaattaatgtgataatttcgttgctacaggcccaaatcaaggaactgcctcctttatgtttcacctcgacttgccttaaaatggttggaggagcgcttttcccgtttgcacctgccttgttccttcgttgttggtagtgtcaatttgagctgaaagcctttccttctcttcactctttagccattgctattttatcgcgtcttgcactgttactcgaacagaattaatcatgttgtcctccctggcattttccgtgccattgctcctcgcgggcctccaggccaccaccgtcggcgccatctcccccatttcggcggtcggctccaagttcttctacgagaacggaacccagttctacatcaagggtacctgagaaccctgcactgtaggtatcctgtctgactgactcaaacaggcattgcttatcagcttaccccaagtgacccgcttgtcgatactgcccaatgcaagcgcgatatcgtccggatggccgagctgggcaccaatgctatccgtgtgtaccacgtggatgccagcgctgatcacaaaggctgtatgtcggcattggccgatgctggtaggtcgagtccacatgagcaatccccggtaaatcatactgatgcgttgtaggaatccacttgttcgtcgacttggacacctttactacccagattgaacaggtaactccacttctctttctcttatggaccatctgttaacgatcgcagaccgcacctcactggaacgaaacccagtttgatcacttcaaggccgtgctcgatgagttccaacagttcgacaacaccgccggtgtcttggtcggaaatgaggtcctcacgacggccgatggttcggcggctgcgccctacgtcttggcagctgctcgcgacgttaaggcctaccgtgataagaagggctatcgcgagattcctgttggttactccgcggccgatattgccgatctgcgacccatgctgcagaactacatggcctgttctaagaatgcgtccgagcgcttggacttttactcgctgaacgcctatgagtggtgtggctcgtccagctatgaacagtctggatacaatatgctgcagaagaacgccaccgattaccccatccctatcttcttctccgagaccggctgcaacaccccctcaccccgcacctttgaggatcaggctgccatcttcggcgataagatgtctgacacttggtccggatccatcatctacgagtggatcgaggagaccaacgactatggcttgatcagctatggcgcttctgtcgacccggcgaccgcaaccgcaagcaacatcgaggacggcttcacccgccagggaaccccaacacccgtgtcgcctgatttcaacaacctcaagtcgcagtgggcgactctgaacccgagcggtgttgccctttccgcctacaaaaagagcgcctccagcgccgccatcgagtgccctgcctcgacctcgggtggatgggccgttgacccaagctcgccgcttcctaccttgggacagacctacaagaagggatcttcatctgaatccacagcgaccggtaagactaccaaggccagtgcgaccacttcaagcggaacatcctcggcatcggcaacaaaggaaggcgctgctcactctgtgactgtcggctcgccagctactgagcgcctgctcgctggatccttggtgctgtctggtctgctgggagccgttgctttctggctttgatttgttctccgacctttgacgattgtggccaagccattgtattgatagcatcacatatttgggatagacaacggccgactgcatatgagtcgtgctgtgttgcatacaggttatgttaactcaagtctgtctttcacgaagcatgaagtgtacacaagaaataaattattagtgaataagaaccggtcattgaccatcaagacattatcatacatctccatcattctttaaacgacataccttctatcccagtaatgttcatctccaactctggcagatatagctcaggcatggcagaaacatcttccttcctatcaaaatcaacaaaatctccctcgaaattactttcactctcactctcactcccagcatgaccaaacccgaaatcaaattccgaaaccgattccgcaaccgaaacagatcccgactccaccggagccgaagacacaacagaagcactctcccccacttcccgaacaacctccaacttccgattattattcccctctttatgactctcgtccctatgagtctccctatgacccccctcctcccgtttctccttaacacaatgcaaaaccaacagcccatccccactcccaccccccttcttcgtaatcgcatccgcaaaacccttccgaaccctccccgccagcggcctcctcgcaccctcgagatcaagcatagcgcgcacaaccagcaacatccgcggcacagcccagaacgcgcgatcggagcgtcgatcccgccgacagcgtttcagcgcgtcgccctccagtcgcgaaatccacgactggatctgcacggcgttgcgctcgaggtggaatgaggcatctgctatcccgccgccgcgaccggcggagcggttgcgggcgctgcggtggccgctgaaggaggcgagggtgcgtttgtgtaggattgttaggatgtcgagggttgttgctgctagggagaagatgtcggctggggagttggggtttggggggtgggtgtggttgtggttgtgggaatgtgggagggatggcgtggatgtggagtggcggagggaggttggggatgttagggatgaggtgttggaggaggaggaggttgaggtggacattattgagggggtgttctttgttcggcgcgcccagaaggatgagatgcggtggcggggggttgcttgcggtgaggtggcggttgcgtctgtgtgggttgaggacgctgctgaggagacttcggaggaggatgaggaggaggagaaggcgaaggagaagcgggagggggagcctgagcggccgatgcggatggctgttccttttgaggaggaggagtttggtctggtgtggtttggagacgcggcgcggctttcgttcagtggggggagcgttagacgggttggtctttgtctgcgcttggtacgtcctcctgaggggaggagggttttggcgggctgcactggctttaggatcaccggggctgtgggacgggtccagcgctctggggcagagtagttgtatgcctcgaggtcgttgacatgtggcggggtcaggagggagtcgagtgcttggaactggccgaggcagatgtggtagtctgcgtcgacgaagatgttggatgggcggattgcgccgtgggcgtagccgcgggcgtgcagccagcagactgccgaggcaaggcaatgcggccaggtgattaggatctggcgacgttgttctttctctagccgtttgaaggccaggggctcgtcggtgaggaatcggtataggttccgatctgccgtggcgccggtgaaaaggacagagacgctgtcgtctttcagatatgaagcgtagacggagacgagatgctcgtgtgacagtctcttcaagctgcggatctcggcgagaacctcgtcagaggagaagaaatgcggtgcgccgccgacctgcacttgggttcgcatgtagactcgacagacagggccggcgagaactactctgtccactgtatcatcacgcccgtgtatcccgctgctggtgttggtgcggaccgcctcgacgggcacgccctcattctcggtatagacgacatgttctccctccgctataccacggactaagaatcgccactgcgcatgaaagaaactggtctcgagagcgacgtcgtctccatctggggaaaggtgtagtaaatcgacactatgctcggcgatgggtagatcatcgtcgtcgcacgactcgtcgacgagcgcgaagatgcgatcgggaataccaatagcgtcgaggatcataaaaacacggccggctttggtgaggatccattccatgtaggtctcgctggtcaagccctcgccccagtccgggagctcgaagagacgcgggatgttctccggccgcagacgactgatgatgtactttttgtcgagggtggatttgatgcgctcctcgggccaccatagtgaagtttcattctgagacatactggccctgcagaaagcgtttgccgatcaacataacggggagaccctgttaatataacggaccatgtcactctggacaaagcggctgtcaaagaacatgtttccacctcaaccgtagaaaggtgtccggaataaaggacggctactggtggagggcttatcttgcaaggagatgggcaatgtccgatcaatagccccggggcatcaaatggtgtctgttttagagttgacttttcaatgcaaagaccaaattattaaagacaatccatcgcactatgtaacttgttccatgtaaagccgtcgctcagccaatctagggccccaggcttatctttgcgcggttccaaggttaccataagataagcgatcatcgcatggcaactgtcatatgcgctgctatagatctattacggggggcaactgcggcttcgcaaggagagattcaataattgtcactgttcaggggaacctgatccataatatgcaccccggatgtatcccccctatgtatccgagcgatcattgcggagagctcgaatgtgatccattgatacacctaccgcgaggattacatcatatgtttctttcaggtcaggacctcctgcacggaatcagccatggaaattggtggcgttcgataataatgccattgacaagcgtagatagccatcttgccgtcaggaaccgaagtcagcacgagcccggcagccccgaccgtttggcgccccacaatctcattttgcacgtcgccctgacccggactgccgggaaggattggatcaacatggaccggggtattctggatgaggatgtaatcagcgtaggctagcgcggataactgcacgagggggagtctgatgaacgacgggtcgattcaggacttcagccgatcaccgaagatagtgggcatgccgtggagactgaaacacgttcctgaataggatggatagccccgttatttttgcaaatacagttgaggtctgaagagccgagaatgcttgcgtgtcgtgagctaggactctgtcagattggcgggcggtcccggatgtgattgatgatattgagaagtatcctagagctatttcggaggacaccgtgattgtacttaaggtctaatttcggcgttagaaatagaatatgtgacacaagtacggagtagttgttgatagacacctccctccagtgtgttgttacttgtgtgctcgtgacttgcatgaaggcggtgaagggggttgtcggcagaatcgtgtcttgaaaggagaacccaattaggaaagtgcaacctacgagcatccagacttgtgaatatcctacaaggacactaagtgtacccagaatgctttaatcttttgggtcttacgtttaccgatgtcaaacagaagccttgggctatctggacaactcaatgccacataatggtacatattaaggggactctatgacttgatatcttgaaatgagaaggtaggacaataggtaaatgcttgaatctactctttttgttactctcatagccttagtctctatgactgcaggactagctgtctgcaacgagagaacatcagagcagaatgtcgtaccttctttctttggcaaacacctgatcgctccttcccatttcgccatggacatctcgcccatcactctcagctgaactttcccctccttctctccttctctcctcatctcatctcatacttctcaccttctagggacatccacgggaatcaaagtcatccccattatgattgttgtcaccggtggtgccggctttgtcggttcaaacatcgtcaaggagctgaatagtcgtggcgtgaccaatatcgtggttgtcgatgacatgactgatggatccaagttccgcaacctggtcaactgcaaagtggccgactacatcgatgcaactgccttccgtgaagcgattcggaccaaagccttccatcatcgtccccgcgttattttccactatggtgaaaactcgtcaaataacggtagcaacggtaagaaaatgctggaggcaaacttcacctactccaaggaactcttccattggtgcaaggaccagggggtccgcctcatctacgcctcgtccgctgccgtttatggaaataacaccaccttcgccgaggaagacttccaggaagcccctctaaatgtatacggatactcaaagatgttattcgatcagtatgtcgtcaagaacactgacatccgctccccacaagtcgcgggactccgtctcttcagtgtttatggacccggagaacagtaccaaagttcaatccctagcactgtctttcagttttacgaaaaacgcaaatctttcaaggcaattgagctgttcggagaatacgccggggtcgaggctggccaacagaagcgtgatttcgtccacgtacaggacgtcgcgcgcctgaattgttggttccttgaccaccctgagatcagtggtatttacaatgtcggcactggtgtggccagcagcttccacgatgtcgccaccgaggtcgccagcaacttcggcaatccagagggctatatcaagttcatttccttcccagccgaattgaaaggcaaatacccgagctacgcctgcgccgatatctcgaagctccgtcgggccggctccgtgctgtgtttccgcggcatcgaggaagggattcgggattacctggagtggcttgaaagtcctgaggggttgctccgctaatccttgcacccaacatgacactcgagtatcttcgggaggtcatttttttattctttgaggacactctattcttcgaaacggcacgcggccgtcatttgctcctgtttgtagaaatctcttcatatctgggtacgctaaatatatttattaacatcgcctgaggatttatttaacaagacaaaggaaaggatatgacccagaatgaaagaatgaaatattcaacctgttgagttcatacctggattgagctgtggaacaaagacaaactaggtagtcataccttccatagtggaacagagattttcaaaaaactactttgctagagaagaaaataaataaacaggacatctttcagaaaaaggcgatgtttatcgcgttcaattagggagtgaataaatagaatacaaagcagtccattaggacagatgatctaagtcaattcccagctaaagtcctgtccacccgaagcaggccgaaccactacagagccgggaagacaaataaggacgaaggaaaaacacaaaacactgtgtactgtgcatatttgtagtcacaagagacaaggaaagtaaaaccacgaggtcctcgcggtgtggtagtctgctgtcaaaacgcatctacatcatcaagccgaagaaagcagcgagagaagccaacagcaggctggaagcgaccgacacgctcgaagccgcgttgaagatcggagacgcgctgggcgagacgactccactggcgctgcgactggcgtacgcgtacccgctcgaagtagcccatgttgcggatgcgggcgcgggaacaacaccggtgtttgccggggaagtgccgctcggagcagccgggaccagaccgatggtcggcacagcaccggcggtggagccggtgtttgtgacgaagctgacctgcgggacggtgacggtgtaggtcgagtaggtgattgtggtgacggggagggcgggggcggaggtgatggggatgacgacgctggcgggggcagtcacagtggcgccggtgacaccggctgcggatgcggggacggacggagcaactgtcgggatcagggtgattgttgatgggatggcggttacgatgcctgggttctgggggacccaggtggcgcagataccggtaaagtaggagagggcggattggatctcggacttcgaggcaccccaggcttggatgcaggagatgactttgctggtgaactcgctgttggggcagaagcaggaggcgtcgctgttggatgtgcacttgggcgcgagcgagagccaggtgttgatgcactggggtacggtgttggggcagggagcggagggagcggggctcgatactggggacacgccgctggggactacggatgtagattgactctcggtggcagcggtggcggtagtcgcgatggttgcgacggaggtgagggtcactgtggaaactgtgctggatgtggtcacgaaggtggaggagcccgaggtgacggtgttggtcacggggcaggtggtctcggtcacataagtcacaacggtggtagtggcaccctcgggaatggtgggtgtggagttggcactggtgacagcgggagcagtggtggcagcgacacctgtctcagagggagccggggtgcttcccgcagcgacagagctggggaggttggaagtcgaggtcaaggtaacagttgaaaccgtgctggatgtggtgacaaaagtcgacgacccagaagtgacagtggcagtcacaggacaggtggtctcagttacataagttacaaccgtggcagtcgatccttggggaatagcaggtgtcgtctcagcgctcacgccggtgggaaccaagctagtgacatcggagccggtggggaggggactggaggcctctgcagacgaagaagagacagggcttgatccctcggaagttccagatgggaccaggctcgaagctccaggtgtatcagatgaaccagtgctggaaacgacaatgatcgagacaccgggggtaccagacggggcaacagtgctctgaccagcaacggaggtggcggtagcggagcagtcggtgcagatcgtagagacactagtcatagtaacggttgaaatggtgcttgaggtagtcacgaaagtggagctaccagaggtaaccgtgttagtcaccgggcaagtagtcacagtctcccaagtaacgacagtagtagtggcctctccaggggcgaggggagtaccagcaggggacgagacagcggaggtcacgctgggagccgagggggttccggccgaagttccactggcgggaggtgatccagccgaggagctcacgggcgagacccctgttgggactgcagacagaggtgtggaaccgacttcagctgtggtagtctcggtgacgggacggacagtggttgaaacagggattgtcgaagtcaccactgtagtcgagtgtgctgggcagttggtaacagtcggagcacagctagtgatagtaaccaaactggtggtatacacggttgaggtagtcatctggaccggagtggtgatcaccggggttgaagcggctgaagttccaacaggggtctcgcccggagcggatgaaacagaagaggccggaatcgaagatgtagggacggatgtgccactgggaacaccaggaataccagccgatgagctgacaggggaaacaccgctcgggcttgggactgcggacagaggtgtggagccgacggcacctgtggtagtctcagtgacgggacagacagtggttgaaatagggattgtcgaagtcaccactgtagtcgagtctgctggacaattggtaacagtcggggcacagctagtgatagtaaccaaactggtggtatacacggtcgacgtagtcatctggactggggtggtgatcaccggggtcgaagtggcagaagttacatcaggggtctcgcctgcagtggaggaaatagcagaagaaggcaagatcgaagatccaggaacggatgtaccactagcaatgccaggaataccagccgatgagctgactggggaaacaccgctcgggctagatacagcaggcacagagagcgagcttgtagcggtagcagtagtctcagtaacggggcagaccgtggtggaaagagcgatagttgaagttaccacaacggtagatccagctgggcaattggtgacagtcggagcacagctagtgatagtgaccaaactagtggtgaacacagtcgaggtagtcatctgaacaggtgtgctcactgccggagtggtgactggagacacagcagagcctggggtagagcctgggacagagagcgaaggcacagcggtagagctggtgacagcagagcctgggacagagagcgaaggcacgacgatagaactggagacagaagtctgttcagatggaactctggtaatagcagaagtactggaaacgacaggcgcagtggttgtggaaccaggagtgcagtcgaagccaacgctgtagatgcccaaaccgcagctctcatgctcactatcgtcgggcagctcgaagtgaacagacgtagcaccaccacactggtcgttgctgaccacggtaccagcggagttgcaggaagcggtgttcttgcaagtcgatccatcgggcatgctgtagatgatgtgcaagtcggtatccttatcggtagcaacgtggaagttggtcacagagaagccgctctcatccgagccacaggagaacgacggagccgacgaggaggagctagaagagctagaggagccggagccactggagctgtgggagctggagccactggagccactggagccactggagctggaggagctagaggagctacctttggagacggtaccggagatacatttctgggtctatagcatggtcagtatgtgcagataaagagaggcatgcattactcacgccacgcttgccaaggctagaaccgaagccattgccgcaagtgaaacccgaaaaggaaaagccaccatagctggagaaagagccaggagcgagatcagtccagctgaagcccttttgctgggagtcgttacacttgttaggcgatctacccgggctagagtagcatttctcggagccccaggactaaagaatttcgagttaggatggatatcagagacgacaaatatcagttgaggcataccgctccggtggcctggccagaggccagaagggataaaaacacaatagcggatgtgaccttcatagtgggaggatatccgtaacgagtgaaagtgggacgcgaaagatcgaatggaaggaaaaaagaagagagaagacgtatgaaagaaacaaagatggactgatgtagactggataggctgcgatatagaaagctaggtctcaatagatatcgtgatataagccacaattgtataggcagcaaaccaggcaattcctattagtattgttgatgggtgacaataagaaaaaaaacctcaatgagattgggtcaatatcaaacgaaagaaagacaaggaaatgcgtatccctgaacgagcgtctttggttggagacgaaccaatatggataaagatccaaaagaaaatgaaacaatgacgagaatgaaagaagtcaaggatctgggcagggtcgcggtctttaaacaattgtccaaccaggccattccataaacttctgcaggcaaagggtctggctgcagctagcgagccttcctctgttgacccgaagtctggcgccaaggaccctggtaagacattttgtctgaaaaaaacccccatctctccaatcggcagaaatctggaggcacagatgaaactgtagtggctgaaaggagggtgggcttgggatccatccagagcttggcgccgattggtatagacgtgcagaagctggagaagagccagtcaggggtcgaccaaggcgcttgccggggggtccgatcccactcagcatcagttcatccagatgtgcctgtgagatcagtcgacattaattgaccaataagcatgacggagtaaaaataggttctgaataggcgcttgatcggcagggagaacttgcataggccgagcgttgacaggaggggtcttcagggtaaacagtccacgtgcacttggagtctttcatctcccccaaggctcttggactgaaactcgctattttcgactagttgaggttaaagatttagttcaaaatcaaataatgggagataagaaaaagaaagaacttggcgtctcgcccatgcacccactttctgcgtcactgcccacatatttgcttattattgatcttcatgatcttctgtatacaagctctttgcatctcgaagcgccagggtccacaaatcagagaatgtctatgcatatggagtattactggggtcagggactgctcgtgtcttaccggatcgacttttcttttcttttctatctcgggtcccaggggtaaacccctggaaggtcgaacggccaggtacccgaacgctccgtctcgcctttcgcttctcggtttatgtggatccgactaaaaaggcccagcgccaaacctgtcagaatatactagtggcgttgtttaaaccgaggggttcctgttcctgttcctgttcctgtttctaagcgtctcacttctgggctggatgtaaccgataccattcctatcatccgatctgaattcgaatacgtactattcaagataggtttaacttagccactacggagtacttcttcctgaactaactatatacctcggctttgaggggtataagtgtcgaattccctattgctttcaaccatgtcctaccgcattggccttctattttctctttaaatttcttgaaatggaaacagaaatgcaaatcgtccccgtctctcggcgcgtcggacgatgcctttgtctggcttaagtccgggtaacatgaaacgggcaactaaaaatacccacgaatgagacttttagcgccgcatggagaatgctacgccgtgcctccctcggaatcgtcggagtctagacgtcaagtctaggtcttaacattaatatattaacctcggggttactttgcaaattcggcaaccatgtgcgcccgggttgcatttttagtgatttcgtgcccaggcagtgtgcgttcaatgtcaaggcttatctggacatcctatttatgtctagctactccgtactcagtacggagtactccgcgtttaatcaggggcaagaaaaccgaaaaaccgacgactcggtactgtttgcagttatattcaactctacttgtcgttccatagatccctagcttcttactatcagcttattatcccgttggtggaacaacattgtaaatgtctgcggactactgagtagcgggtttcactagaaaaagtggcgtttacttccaggaccgaagccgtgttggagtatgtcgtacagatatattttgagtttagaagtagagcttctttagggtcgtttgtggcttccctaaatttagaaccaatactaagatagtagcgagattgaagattgggaaaccataatatcaacaactgtaaggttgttttatctttatcgacccattattccttcaaaattctcacgagccttctgccccaggatcttttctttgccttgtccggatcttcaatcacccagttgagcctatccgggaaattaatgtcatccaatgataccctaaaaaagttgaatgtaagtatcgagtcttgctttgatatgaagcaacgactgaccatttagtctcgaaccaccatttatatccaaaaaacatgaggaaaaataccggaatactaatatatgacgcgataaacaacgaatagttgaacggtgtctcaaataccgtgaaaccttggatcagcaataggaaaatattgaagaagaagttaccccagtagatcgaaatgtggcccggcgctgtatagggaaattctttggcgtcgatccctttcctcttcgcagcgccacgaactctcagatgaacaaatgtgatcgaagcccatgcgatgtaggccgcagttccaccgaaagaggtgaagtaggaaaacagactccctgccgttgtttgcaaggacatcaggcctaggaagccccacatatttgagaaaataattgccgggtatggcactgcacacaatattagttgttaccagagagaggatagaagaggaaattgtcttaccccccctagtgtttgtgattgcaaagcacgagggagctttgcgtttcaacgcgagagagtaaagtgtgcgtgattggatgtagatcactccattcgcagcggaaatgaaggcaattataataatcgcattgacgaaatgcccggaagacttccacccagcaagtacaaaaccaatagtgaacggggatgatgccgttgtcgacgatggatgcaccagatcatccgatgttgacggacaaatcaggccttggaaaaacgacatgccaacaaacacgaccaagatacgatagaggatagaattggtggcctaaacaaagtcagcatcagattcactttaaatgtcaccgatttaggggatgcacgcacacgaggaacgtctcgttgggggttcttggactctcccgcggcgacagaaacaatctcagttccaacatagtatgcggcggccagaacaaatacttgaccaaatccattgattccatttcggattgggcctggcagaatgtcagacctgcgaatcaattcgtgtgcgagaatactcaccgtatggctctttccagtacctgaatccgacatacccattaccaaacgcaccagtatcggcaagaattgagataaaaaatagcacaatgagtgacaggaacttaaacatgccaaagtagtattcagtctccccgtagaagttcaccccaagggtggttagaatggagaaaaagacaaagaataagatgtaccaagcccagacggggatcgtggtatcgggaatccagaattgaaggaagactgtggcattattccaatctttgaagttgatgagtgcaggccatttcttgcttgttgatgacactcacctgatgcaagaaatacactccacataaaatagtaaagccaagatactgcaaagctgagggctggatctacgaatcgatcacagtgctatatgaaacaggttagcaaaatttccagcaggttgagattggagttacttacttctacaaacccgccgtgaacaggaaagagcgtggcaacctctccaacactctgcatcaaaatccacatcgaagcacctgggccatgtcaactttgtgagaaatatgctttgcaatgctaccaactcacccacaacagaaaatccaatcaggagacccaatggaccagcttcgtagatcccatagcccaagccataaaagcaacccggtccaatgatactccctagggcaattatcacaaattgacggcccttaagcccccggcgtaggccatcctcgatgatgtcgccagaaatgtcgcgatggggttcatcgctctcttgaacttcggtgacagacggctttttcgatgtatcggcttttgtctgcggtaatgagaagtctgccattttgaaagacagccctagagtgattgatcgtgcaaaagaccgaggactgaccagggggtctgttttatagccttggaatcctccacatttattgattggagcttgaactgagcatttcggctaactcgtttagattgcttgaaccaaatgctaagctaaagctaataattgcttgtcgtggccaaatattctaccagtgagatgtttacttatatatcacgccattgaggagtacaattcgtagatatatttcggactatattccggcagataacaacagtgtaatttcacttccaagttcctcgacttcgaaaacaacagaccaactggggaacttttcacgagaaattgaactagaaaatcgaataagcaacaagcagggaggaatttggtatatcgaaaaattttcagttgccaaaagcgcctgttgtgtgaacgcgtagcgtcatcgaacatgagaatgacgggactttcaacgcgatgcaggcttgtggagcgttttgattttcattttcggagaattgtcctcatctatctcgagtttcatctattccaacatctcagcgcacagaatatgaagttttcatcgtcgagtgatcatgcaagtaacttcccgaccttggttggaggtaacaacggcagtttcacgcaacccggcacatcgttttgattccagtaggcaatcccatgtcgaagccaaccggcatatgtgccgggcacagtatccgacccgggattgtcctgccacagcgagccgagcgtgaccttgttgacgcgcagaatgaggccatgagccagcttgaacccatagctgcgcgacaaacaagcctcaacaatctcacgagccttctgttgctcgccagactcttgtttcccctcttttggcatggatagcgacaacagatcgaatgcctcctggccgttccaagcagttaactcgttgatgagctgcgacccttccatgaactcgatcgcatagaaatgtgccacgcagtaggcagggccattccagtcatcttcggcatcaaccaatcccattaccgcactcgccacttgaccttggataatatagtcggtcaacaggcgactgacctcggtggggccaatgaaagtcccatcctcttcagtgatcgtaaactcgccgcccatgagaggaactccttgaagtagcgggctagcgtacattccatccgtgctcgtcttgcccccatccgcggcccagagagcgaggagtagacgatggcagcgcgcaaaaagcgcattgttgggcaatgcggcgaggaaataattacatagactgtaatgatcctcgccactgggggtataagatagaacttcatacggggaatcggggttcgcgattgtcttgtgccagagcgtatccagatctccaatttgcatcatacccacgtccgcgtagacacctccatatcgcaacagcaacggccagcaaacaaggtctgaagtatgttgtagtgcgtaagggccagtgagagtctcgtcggcaaaggcgcgtgggaaaagtgttggatcggtaacatccaggaactcgacgatgttgctttttgaaccgggttgtcggtcaacgatccgtattgtccatccttgctttgtgaatcggcggtgccatgcgcgtacattgcgctgtgtgtaagggtgcatgttgatgtagcccgagtgccagaagaaccatatatttttgacgctggttagcggctggggatgcaacaggtcaaagtctatatcggcgtcggagcgtagatcgagaagcccagcggggatagcgtgcatcccggacggaataagatgttccattggagaaaagaaggtagaattagaagttgaggttgtgtttagtgcgagcatgccacaattattgattgacagtgtgctgtcttttatagatccgaaagttcccacagaaggatatcagccaatcacaacgaaatgatccgatgtgagcaatgatgagtcaagccctcgggactcccgaggtcccctatatccactgaagaactttctgggctcctgaggtctggttgtagaaattcccgtctggggatttgtctgtccacctgcctggacatacctattgtttggctgtacaaacttattgtgaaaaactccgctttcgattgcacacttcgacaaaagctataattcttcattctccgaggccgcacatcaatcagggcaaggaatgataagtcaacaaaaacgggaagaaagtatgcgcatggtagctgaggctacggagaacatgagtctcatgaatcacggctggtgcttgagctgcaagcgctgagggttggcgtggcagtgtcagtaatgtcgagatagtggtcggggtcgaaatcaaggatttttggtaatattacgcacgtcaagtgtttatatctataacccaaggtagggtttcataaaacttgcggaccttggtagatatcgcttgaataaggtttaggtgggtccggggttgtgggttctacatcatgaaggtcggagcttcatgagaggacggagacctattgattaatgagggccagcgagagaatatgataaaatatttcgaatgtttttgatattggtaaagataaatgtaaacagcaactcaaacagccataactcgttagagcgcaaacccacaagtttttaactccaaaggtatcaccagccccccccacaggggggggggaaaaannnnnnnnnnnnnnnnnnnnnnnnnnnnnnnnnnnnnnnnnnnnnnnnnnnnnnnnnnnnnnnnnnnnnnnnnnnnnnnnnnnnnnnnnnnnnnnnnnnnnnnnnnnnnnnnnnnnnnnnnnnnnnnnnnnnnnnnnnnnnnnnnnnnnnnnnnnnnnnnnnnnnnnnnnnnnnnnnnnnnnnnnnnnnnnnnnnnnnnnnnnnnnnnnnnnnnnnnnnnnnnnnnnnnnnnnnnnnnnnnnnnnnnnnnnnnnnnnnnnnnnnnnnnnnnnnnnnnnnnnnnnnnnnnnnnnnnnnnnnnnnnnnnnnnnnnnnnnnnnnnnnnnnnnnnnnnnnnnnnnnnnnnnnnnnnnnnnnnnnnnnnnnnnnnnnnnnnnnnnnnnnnnnnnnnnnnnnnnnnnnnnnnnnnnnnnnnnnnnnnnnnnnnncaccagcccccgcaacaggcgggggagaaaaatggccagtcaatagatatgacatatgaaatgaaaaaaggaaatgaaagattggtcagataatcaaatatcaaaatggatcgcttttgggttctgagaaccaacatcgatctttcgcaagccaactcaatatgcatggcaaatcgaactcaatcattagaaaggtagactggtctcaacgacacgtcagtggcaatatgcaatacaaccagagcgaagaacatgtgtgctcaacgcgaggtcaagagggtgaaggcacaagacactaatagtcgagtctgccaagcgactagaaacaggtaggataaattgtggccgtggttatcatatgatccttggaaatccaagagtcgtgcaatcgtgatacctcagagaggcgcggggatggggagctgagagcgacgttgctgagcatccatcagcttgcgtcgcacagcctcaccacctgcaatgctgctcgatttgcgcttgcgggtgggagttcgctggtcgttgttcttggcgtgccggaagacactggcaggacgagcgggagagtttgcgggcatgaactcgcggtgctggggaaggcggaggagcgcctggtagcggttatggttgcgacggaaggcagtaacaatacccttgtcgagatgattgaggaagcgctcttcgctattggcgggttgcgacgcagactggcgggtgggagtaggtgtacccatggacttgccgaaaggaggggccattggggacatgatatcgtcatcaaattgcttatccatgtcctcatcttcatcggaggatccattaccaaagtcgatgaagtcgtcgacgttgagagcagactcggggtcatcttcttcatcttcttcgaacgaactgtcgatggtgaagtcctgagaagggtagaatgcctcagggggacccatgacctggcctcccggggtgagatcgttgccgagagcggtcatcatgaggttggcactcgaagccagcattgggctgaaatccatctgattgggcgaggcgagtgcatcggtgtcgctctcatcaaccaagtgaagtgtagtctggcgagggctagtgttcgcagttccgggcatgctggtggcggcggattccagccagtcgtgacgagacgaggcatacgcggggataatcacgagatgcttgccagtgcaatcgaccaaagctactggcttgtgggggtctgcgacgaaggttcccatgatgggcccgcggcggcggggaatacattcactcttctcgtccacaggagccaaagagtcagaggagtcccggcggagaagggatcgagggtgggtgatggttgctggcggagggagatcttcgtctgtagtgtcaccatcatcgccttttcaaaggggttagcaaaagcaaaacacaatacgaatgaccgattatcatactctcgtaaccactcaagctggcctcggaggatccgtcggactcgacatggtagatgcttccatggccataatcggcgtcgccaaacatctcttccgattgccggcgggtatttctctggtagttttcattgtcgttttcgatcatacgacgcaattgtgggtccaggctgtcctgctgcaagaagtcgccgggtatatcgtcgtcactgtgggaatcactatcggaggacgaatcggatcgctcctcgaagtgaactcgccgggtgactggcgtctcaacggcttcactggtcacctcaggctctccaaaggtgtccatggcactgtagaggtgctcttcatcgaagaatgaagcagcaggtaggaacatgtggtcgtcgaacgagttgatagcccacccatcatcgtcaaatccagagctgggcaaaggccggttggttttctcagactccacaataatcatttcttccaacttctcgacgtcttggtcttcatcttcggcatctgtgatgtagtctacaccggcatagacatcatctgagctatcatccgagtcattggcgtcaatgtcatcattgccatcactgctgtcgctgctatcatcgtccaggacgcgtcttctcttgttgactgcgggttggcgccccgccttattgtcgcgacgacgaccataagacggggcccggactgctggttcttgttcatcgtctgcatcttcttctgaatcatctgcctcatcgctcaggtcctcgagggacgagaccgaagagacactcgagaccgatgatgatgaagctctccgtttcctatcggatggctgagcattggctacctttcgctgattggccttcggcgacgaatcgagattccgcatgatattggacttgggggttgaggggcgggggtgagagttcttggcggagctcttgggagcccgcttggaggagtatgagctctgcggcattttgtaatagacacgtatgaatggagaggggttgttttgttcttgtggacttgtatggtccttgttttttgttgttcaaatggtccggtccgtttcaggaggatccagtgataggatgaaggaagagggggtagatcttccttagttgagaggattgttgtagtttattccagaagagtaatccgtgcagggataagtcgaagagagattcgaagggaggtgggacggagtggaggagatcggagcggagtggagggggaggagtccacgggggggggtttcttttttcgtagccactaaagcacccgcagtccgttgcggacgctgtagtgctccttctgggagtttgctgaggggcaattccaacgccttcacacgaggcgtcgaaagagtaacaaatatcgtcaagtagaattgaagatcggagctgcaggactggggagccggcagggacaggctccccagcgaggcatttacagctcaacgaaggccatttggctgattcttgacgatatgtggtggatatgtagtaagtgtattaagatggggttcaataagttcaggagagtccgaagtagatcagttgcgagtgctatgggaaagggaagaagaagagcaggtcatttttttcccccaagtgggagacacttgtgattggctgcagaatacgaccgcctattcgttggcgccgctcaccgactctttcgcgccaatcagcgaccgccgaaagttgcaacgggaaagtcatgaatttgatctccaccaggccatttacttaaaattagatggttgcattgacattatattgggcattgggccctattgctactgatgttgtgcagtactggcatctcttcgatccactgctatctggggccttggaggaacatatcccggcaggtcgagtccaaacaaaacaaacctaacacgtcattcaacctcctcggcattctccccggaaaaatcccatggcgaaccatcccagtcaacgcaaaatacaaacccatacaggttgactcgagtttcgactcggcactggcagaaacggcatatcagaatcctagtctgcacggtcatcaaactagaatagccacggtgcaacgattgacccgtgcggtatggcgtgcatgatgattcatcctcggaccaggagacttttcatcgatgacacatctcgcgatgaatcatattgtttcgtatttggacttcacgatgacccgaattttcactgtgaggccacgggctaattggttcgaaccagagatccggccacttttacgttttgagtggcaaagcgctctactcttttccgacccgcttggccattttgcccgtcttccaagccgggaacctgcaggcctttttctttttttcttttcgcccaaaggtctaaatgcctaactggcctaaagatgatcagaggcggtaaaaggacagcatggccgaggctgggcgcgtctaacatgcatgagataggtccattgctctcttatctttgtcggtgaggggtcaattgtatagcccattacagttgtaacgtacacaatgcatgttctaccataacattgcggatataaaagaagtttcagatattttatatagaaaagtaaagaccatatttatgaaagagatatatatagaaacatcaacgttctaccacttggagaatactcaatatttcatcctaatatattaatagtaaataaaatagacctcctttagactatatatcccctactatatcttttgtaagtattcctacaagtgacaaaatctctatttcatgtttatgtaccttttgtatgggcataccatataaaagatacctaaaaagagaaatctctcgtttggtgagaaactctcgttatgtgggacagacccatacctggtacaggtatgggggcggtaagacggctatcttgtaatatcgatcgtcttcgcgactgctaagcccttatatttctccgtgagatatcgcccgatcaagtggtggtcgaataatttcgattataacgaagataaactcggctagccactagtacaatgctcatgaaaccttttcttctgctagaggcgctcgtcttacgggtggtcagcgggcatctgatcatgatgtcgcctgagccctacagcaacaaaaccctcaacaactctcctcttgccaacaacgggagtgattttccctgcaaattacgagatgatgcatttgcggcccctgcgaaagagactgtttacgaggttcatgggaagtgcaatccacgggggcggatcatgccagttgagcctcactgaagacctcgcgccatccaaagaaagcatatggaaggtcatcaagtcttatgaaggcggctgtcctgcaaatgtagaaggaggtctaagcggagacgccaatgctgacaatggcattcaactcgatttcgcgatacctgaagatatccactccgggaagtatactttggcctggatatggttcaatcatattggagatcgtgagatgtatatgaactgtgcactaattaccgtcgacagtccttcattgcctgtgttcaaccagagcatatagaaccaagcgcaggattatctacctatgttcatcgccaatataaatggctgtatgactccacaaaatttggatatccgattccctcagcctgggaagaatgttgaactcaatggtctggcgcgtaatattcttcctgacggtcaactagtatgcaccggaactcctgaatttggtgactcagtagccatggacccgattgttctagatcttgaaaagggtaatcattggaaggctattttatactccccgccacttctctagttagcattcagccgttaccttgctcctgtcgtgcttcccgccgtaatacaagccatcaatgatacctatctttggcattcgcggcacaattaaactggacaagtggtttaatatgaaggtcattgattgagcaaagcattggggattgaaatatgcatgaaaatttgataaatcattgaaaaggtcttcgccatactttggagttttaaattctcgagttcggtactgtactctgttgtattacgactgctttttggcaatggtaattcattgataacaagtatcataaaaggatgcaacaaaatttgtagaataacccagccacaaacgagttaatcgcacagacaatgccactctgcaaaaattgggatgaagatagaagagccgccgtacttacagtggatttcgaaaacagattttcctccagacatacacgtttaatatccagagactcactttggcccctagtccgagtcgtccgggctctagattgtcccgtagccaatagtaagacgtgattcccacgggaaggggctttatatagccagaataatcctaacgcaagatttgtaagggacttggaaagaaagcgtgtgtgtccggggggtaatctattttcgagattctctgtacatcaataggtcaagattggtttgatattgatagccatttgctgactagaacagacggaatccgtcagaataaaagtctaatttccgaagcttcgaaagagtgccaaatgctcctcgaaaggttttgcacgtaaaagcaacgtgtacagtacctggacttgaatgtacacgataactcgatgattggatgaacgtctgttattgaacttgtcttgcgactaattctttatacttaatttccaccagagtaacttctcaattgtcgtggcgtacaatttacacattcagactcctgtgtacactagggacgggactcagagctgaactttgacgtcaattgtttgaaatttgataccctcaagttttgaatagaaaccgaaaatgaaccggaaaattttctaacatttgtgttatgattgcaatgtaagcagcttgccgctagagaaatcgaaagaaaagttgtccaattacgataggcatcgccatccttactgagcaaccagacatgctgctcatctttttgtattcaaaaagctgcctatcatcgacgggctggatgggtcgcattggagaatgatgttcttatatacgatgagaatgagtttcgattcggtgatacacgattttgttcgtcaagttgataagcgatttcaactcttctggacttggcctttgctgaaaaggggttgtctgggacatcggccttgataaattgaagaggagggggccaatcacctgcaggatctctctcaaagggcgttttctaagctgatcaggcagattttcaatctcgacaggccacttatgcgtcgaatgacatttacccatcagcttgattacaatatccgctaaagcgtacagcttcattgtcgcagcatccatttcccaagcacttatctcgcagctgtcctcgatacccactggtgaatggaacggttagtaagaagtctgaaaactggggttaatttgatatgcgtacctatcttgaccttgccagactgagtgaaaaagatggtatgcattgtcaaagtggccagcaccctcccgcattcagccaggtgctgaattccttcgagtatctgttcataatcagcgatcgctcgtattatgatataatatgtaactctacttactggcttgacaattgtaatgatctcactcgccgtgatcacgagcttcgttgccagaatctgggtgacggaaacttctacatgctcctaggccaaaaacaccgaatcatcatgataacagcatccaagtaatgaccggaaaatggggtgagagatgcgattcagcgttcgttgcaatccaaggtcggagaatgcttgcagctccagtttctgcacttggacaaagtctgcctttgtcttccttgtatcgagccagcacatacaatttgatatttgcaatgggttcaagtatgctccatggatcttcatgcaaggctcccgaactcgagcgatatttctcgttatcaagcgttgccgtcttctctttggttctcaacgacttcgggaaagcttgatccactgtagatgtctcggagactgaatcagcttgaaggggcggtgctttactgacctatatggtaggaggtctgcgattatgcttgctggcgctcatacttctaggcgtgcacttccaataagataaacttagaacgtcaggtcatctgggtgaatagaaactcctatcgatgagggaactgagcttcttatatacaagagcaggtacaaagacttgacgttagtcttcatttatcaaccccatctccgccgtaagtcttttgcgtaaagtttttgaggcagcatgcgcgattcaaccttaacgtcaatttgacctcaacacaaagttcatttcagcaaagagctttaacatcaacacctggacctaggtcgctagtcatgtcacactttttttcactaaaagtcagctttgcgtaaataggtgagaaggtttgtactgcgttgacagcgtgatctcaacccgtggttcatcgactcataaatgacgaatcatattcttggtcgttcatactgtatcttcaattgtactttcactgtagcaatctcaaagctcaattagtcctggctttacccatccgtacttctgcgacccaattacagcaaatcttcatcaatgagcgaaaactggtagcaagagtagcagatatcgaatgccttgggtccctgactgctggcgactgggcgaacaactgtgtaagtcatattctcttgcttcgccttttcgaaagccccacctacctccttctcatagcaacgatgggtcttaagtagaaattactggtatggtttaagcacagtccaataaaaatagtagattcgaaagatggacatttttcgtgtcattcactgatcaggccagcggaatttggagtacagtgccaccagacttcccaacacatagcaagccgtccctgcgataggcataactatccacggtcgcttatccccagttttgttcctaggaagttcattcatcatgaggaatgaactaagcaggaaagcgggaattcccatatggctatgtgtgaataagacaactgactcctaggatacgcctacgttgccctttcgtgtatcttttcgttgctacctttgcgtcatcagcccaatctttggtcaatctctgatgacacagcctatgctttccacaagatataaggctcagctttacccttgctttacgttctaacattttcactcacaagaaaggcacctcgtcaatttgaacatgacagaccagaaatcccgatggcacgcgcaaatgtcctctctcagactacaaatagctttggggcattcgctctccgactcagaagagaaaacaacgccagtatctggcccaccaaagaaggggttgctggcatccgctttggatcctgacacatttattgaaaatggaaacacgggaagatctcttgcacactcgccggatgtaagtttcgcctaatgcaaagggctgtggatggggactgacagtatcatgcgattaggctatatctttaacctcccgtgattctctatccgggtgtacagaagaggctagaattgctgtggcgcttacaaatcttctggttcttctactttagcagtggcgacgtactcatttcagtagacgcgtacggatactatggaatttgcacggttttcagaagggtagctttggaactacaaaggagaataatgacgtggcttagtggtactttgtggtacttcatatgattatagatcgacggaagcattgtattccgtcaggctggctggggaaattgaagattttattagtgtgaataatcaggcacattgaacttccctttccattgccaaggttccatgagctctatcttcctcccacacactttttctttctacaaaccacactgcaatgcgatccactcttcagtatcaaaatttgaggaggagtagttgtggcactcatcccatgtcgtgtaagcatcttcgtacccattattgtcacaagtattagtgttgtaagcggtgcagattgcaccattaggaccagtgattcgccacgacagaggcttggtcagggttcccttatcacatgaggtattagagaaacccccatcggtgtaccatccgcaagaaacatcagtgtctgacgaagttgtggttaagtcgttaatgaccaagcacgtgttctgggtggtgtcttcgttgtaacctgaaactacataatagtcaccactacagtctttctcactgtaaatggcgatagaccacgattcggttggagtaggagcggcagtggtagttgatgtcgcttttgtcgtggtagatgtcgcaagtcctgcccatgatgaccagctggagagatagtcatccggatagtcagtctgaacaggccaggaagtcacagttgctatggcggcacttcctgcggctccatccgggtcagtaccgagagcgcaagtacccatagaggcggtccacgatgcgtcatccattgctgtttggttcaaaatctcgccagtgccgttggcataataatcaaagtaaccgggcaccaaatatcttttaacatcaagtggtggcggaggcgccaggggaagatgtggatagatatcgccaagcttgttttggatgaacttggccaaggcaaatagagccatgctgtccgcattttggatcgtccaatccgcgaattgggtttgcacacgcgcaagacccttattcaagtacggtgcgtatgccgtgacccattttggacccgtgtcgtaattgtacttcatcttgatatccgtgacatgagtatttggaccccaaccgtttgctaaggcaacccaatcaatgtgtagaagctcatgcatccacgtggtagcctgattcccattgtagttgttcatatcagcatagatcgccggtgtgaaaccagggtttgcgctttcaagtacggttttgagagtgggttgaccgaagtatggtgggcagaaattgatagcaggggcagaaggctcgtcttgatcactgttgactgtgtatgcaacgatttgggtatcacggccgcatgaacaagccaggtggggatcatcacagcgagccacaattctccagtcccatggcattcctatccacccaggctgaattgtggcaagattcacgtagatatttttgaatctttcccgcaggtgctggttcatagctggtgcgcccagatactcgacggtagctgcctcgttccagtttattttgtcatcatatgcttcgctcatcatgtagttcataatctcccaggattgttgccaccctgagtagatttccttcttctgaagtgggtcacaaccatgccagccaacaagcttggaggcgagtagagtgagattataggtctcaaagttagatgtattgtatccgcttaggctcagagcagccgtaaacgcgtcctccgcggcggtgatgttggaagttgcatcggcttcggcagcagttaggacaaaattagtcaagtccaatgcccactccaccgttccgagaaacccataagaagcatagcggttgatgcgagagctcttagtgctatccttcacacgtccgagccacaggtgatacgccgagtagctgccaatattattggacgccatcaagacccctagggtcgagccggagattagatactaaaggatctaaggcctcaatatgaaatagatcatatgaaatcactacattcttgactaaaaaatcaacagtagttaggtaatatgtctttgatagaagacacccgcggcagcatacactctgaccgaaaatcaaacaaccacccgtcaaggaaggtcaagaaaagggcaatatttcgggttggcgtagaaagttcctcctagcctttcaatcactaagcaacgctcctccatggtacgggcattttgtagcattgctccacctttcttactagcgccctcttttgttgtcttccaaacccacgccccaccatccgaagtccaaccgacccgaacataattgttagacctttcatcaagcatgccggacattccactttcaagccatgctaattcggttggccaccaagtcgggctaagatatcgcactattaggagttagaaatatatagcgtcctaataaaggtattgtttgatgtaacttactacgatcgcaatgtgcattctccttttgttgccagttgggatcggaatttgttggacgccttgtattgttgaatgggtccaattccaggaactctatctccactcggctagagacatcaagcgtatagattccgccttgggagggccatcctttgacagtcacgccaggaccagacgaataatatatccagaactgcggctctcctagaaaccgatcctgaggggtagtccattcgctgctcacttcttggagcagttcctggagcgcgtcctggggcattgtgagtggaatttgaggggcggaaccctccggcttaatttgatagcctagccagccagctgtaactgatatgagcagtgggatcacagcccaccagttcaacatttcccagttttagagagagataagtcagaagggacaatatcagggttctgggatatagatagacgtgtgccctcattaaagaagaaacataaagtttaggcagagatgattgcagcttctcagtgattcaagcaggcaaccgataagtcagcaggtttcgctaagataactctaccgttttgcaggtcgttatgttgaggagatgcggtgttcaatgaaacgtgcgatacagaactccgtgcgtgccggtctcgtattttgttcattactcttggcattgtccggtgtttcaatgtgaaggaccctaagtggggggcgaggctgcagacctcgagagtgaagtggcaaaagatttcctcaccaaaaaaaaaaaaaaaaagggtctcgttaccggagacaagccattctgtctaaactcaatatcaagtagggtttgtccagctcggtggtgaattacgttatagattaacgtggggtagttagtactccgtcaataagttagcgagacaccctaacatacatacaacattcaccctcgaaatgtgtttgattgacataatatgtgacaaaataccatttgcaatcacagaagctgaagcgatctgctagattatataagtcatcggacccccagccgcatcactcatcaccaacagcaccagttcgcataaaaacacccatcagcaatcataggcacaaggccaaagcgatacaaaatgactcggaaccactctatgacttccaatagaggtagcaaagaatacaccagcgtctgcacattttttgtgcagttcctccagtttgcgcatagtctccagggaactctgctgaacctctgaaggaccgtaaccttcaagccccaaggaagtaaggcgtggcagacaatttgactctatcaagcggtcgatttgatcgacggcccacccaagtagctcgttgtggcagtggcacagatacaaagtctcaagggacggcggcaaaatcgccatgagttcttgcgtgggctcaaagtcctcatcaagcttagcaagcattgatatagaaatatgtagatatttcaacatgttgaaatcggcaaacgatcccatccatccctcatcgtcctccgggggttcgtatgattcgccacagagccaaaagccttcaagtgttgtcttgtgaagggagatagattcttgaaggggagccgatacaatctcaggcccatcggagatcattcctccgccaatattcaagcgaaacgtcttgagagccttgcaagattcaatccagacacggaagccacactcagtgttggtcatgtcgagatcaatatcggtgacgtctgagaagggaataatgcgggtttcttcctcttcgcgagcgttgtcgacgatagcgtgtcctccaaccctgcgcatggcggggaatttgaagaacggatccatgaggcttgcatggatggaattttccgtatcataccattccccgaaagcttcaacgaggcgagaaaatgccgtggtatcctctcgtgcagccttcacgaacatccccgtaacatattctgacatatccgggtagcatatgctgattcgtctcaagcctttcagctggggaaggagcaaagccaaccaagcgtcggtgtttccgagacgcagttgttcatgcggttgcttagaccaacaggtaccagcgacaaatccgtcaaggagttccctatcatattcataatcaacgtcgacttcttcattggcgtcctcagtgtcccagtaccctagccgtatagatcgtactgcatttgccagctgcggacgtcgcgcaattgcattgacaagtcgactggcttggccaatagtatgatgggtacaattaccaagaataacccgagagtagagcgctggtagcagaactgtgtacagtcgacgacatgatcgaatcagggaacagcggtcaccctggaaaggcagttcttccgcaatgaggcaaagagcctcctctgggaggtcgagaagcatgaccatgatgtaagtagaaggtttcttgagaaagaaaagagatggtagttgggttcaggttcggcgaggaggttgctgtgtagaatcacgaggtgggggcgataattgtctacagcacttggtaggagacccaaccacggccatagtactccgcatatatactcggtattaagagaatatgagtgttggtgtggtcaccaacacagtgagcgctaagaaaggtgatgcgggatgtttgacagaagaggcaacaagtggagactgccaagagcaactatcaaaagaaagcgcttagctgagcggttcagtgcatgaaatgcgaggtgtatgctcagtgagaccgaatgatattgattaaattaaaataataaaaaatcaacggaataacccgcgaggaggtctcatttagcaatccctggattttgggtcgcccactcaaatccaagattccttggttggtgggatcaacaaccatggttccgatcaacactaaccttagccctagagttggacaaagctcacaaaaggggagatcaagtgccgggataaggagtaacattactaggcatacgctctgttttggcccgaccaaacatagacagacgtgatttcgaccgggttggaactgctggccgcgtactttgttgagtatcttgttgggtttcgctctctacttccgcgggaacagcgaattcgacaggagcggcgcgggcctcctctacctttatcacgcctttgcgtatctcatcggacgaagcgcccggtggtgcggtcgtcgtcaacgtctcagtagggcggattagaccctcggaagtatcttggttgagcttgatgatctcttcctccgtcaccagacgctcattctccaaacggacctcgcgcccgcgtttatggcagtaccacagcacaaagaggaggactggagaatgttagtcagccaaaatactattgcacttggtgtgatgcttcacttactgaacaatgctaaagaccagagcacattcatgcccataaccgccgggaaccgagctcgcagaaacgccatgatggatcgcagcatgcctacgagagcagcgggtttcgacacaagttcttttagacttggcactcccattttttctgcaaccgcagcagccttgcccacgttctccacattgattccactcttaacggcacggtcggcagcaaccgccagcatctctggagccaaggtttcagtccaacgctcaggaagtttctcgatcaatttttgcatgggactaggcagcttcgtataggtgtcttgtagttggcgattgccgttcgtcagcagcatctccaagtcgtgataggcagttgggactccattgatcagatccttgaagatgagcttgaacttgcgtaaaagctcctgtgtctcctcactgatcgaaaacacacggttgttatccgctgccagattcaatcgctccaaaatatctgtcacgtcgtcggcgtcgttatctttttctgcgttcttcccgtttgttgacttatccgatgtggtcggaggagtcccggcttcggtctgtgatttgttcgcatcgtcggtgtctttgtcctatttgcgcgaactcagatgttagtacacactcaaaccagatgcaaggatccgaaaatgaacacgattaaataaatgaccaaccttctctgtgcttttcttccaaaacatggcactccatcgtttcttcttaggtggaggcttcgagacttccgatttcggtgtctccgttcttgtcaatgtttgctgggaactcttccgttcttgcctaccctcctcgccaagctcctttgcaaactcctccccaggcgaggtaggtagagggatgttttcggctggttcgcttatcgcaggttggagggacgccccagtaggactttcggttggtgtttgtttattctgctctgttggaggggtaacagattcaggctcggcggtgacttcgcgtaggtaggcttcatcttcaggcgtcaggacaggcttgggcgcggtgatcatctgtgacgaacgccgtcggtgttttatttggttgaaatactgcatagccataatggagggtgtcaagataccaaggacggcagtacgagcttttatttcctgttcctcgatgagaggtgcgataggaacaaagcaagctgaaacgaggcgggcgcgtgctgaatgtaaggggaagcgcgcgctgtagattgtagtgatagatcaactttcccaagtggctacatgatatgtcagatgaaataatatgatgatcaggagatgttgcagctagccaagttgtatgctaacaccaagcttttatttgtgcattcgagcctgttcatcgcgatgatatcactggtggcttccccgcatgtgccaccgcatcactaacaccgccacacgtgctccatttacggactcggctcgaatatccttaaaagagctcttttcttccactctgagaattaattttctggcgttctttatctatgtgtattttgagtggaaggttgtgagtttatttattcaggtgcacctcgctattgtactttagatggagctattcatttttatgtgctcgtgcttagaaaaatccacgtcttcatttgatatcctaggtgttgaagtcaagatgaaaatgacggatctgccgccgcaaaaaatcgcatcacggccattgtgattactgggtaccccatgatcacatcatgcaatccagttttcaagatttcctcgcgaataaccccgttctctgttttccattccatcatagacccggcaactcccagatctgctttcgaatcaagtttcttttgctcaaggtcgtcataactgatctccgctggcatcgcagcattcaccgcgtgccaaaacaaaagttgggaatggtgccatggaatgtcatagtcatcctcggcgtggattatcgttattcggtatttctctccgttgatctcgttcgcccggatatattgcgcaatggaatccttgctcggccatttgtctcgaacgaatcgctgaagatatttgaagaggaaagggaacctcgcaactggcgacaagattggcacggtacccgcgactcgataggttgagaccaatgtcgcgacgtccacaaatggcgcaacgagcaccgtgcctgcgaatactattggtggatcctgcacagcaagatgtttggacacagcgatgctcacggccgtacccatcgattgagcaaagatcaaaattcgagatggagggatgcctgcaacatccattgcccaatccaccacggcaagggcatcgatgatgagcccggtttcagatggtgacccggtactcttgccaaatcctcggtaatcaaaggtcagaacatggattttcccgggactgcccgctgacagcgcacgataatttgggacgcggtaacccgaggcgacggtccccccagcgccgtgcatatgaagaatcaaacgagcctcagggtcatcccgcaataattgaaatcctagccgagacttgatgtcggacacaaagcctactggctcttcgacaagaggtatttggtgcttgcgatataattccacaggaagaatatgccaagcgtatagccattcaccgtccgtcgttctgatggagaacggagtgacctggttcttcaggaatccaaacctttcagggacattgaggtctttgaaccatgtcgcttgaatcgcgtggagataaacgacatgtgattggaaggttgatgtggtgagtaaccctaggaggatcaggtacaacccaaccgcgacaccgaccggtattgacgcatatttaaagaaagacctggctatgtcgccaggtgccatggtggatcgaaaagtgatgatattatcgcgataagacagagagtatgtctcaaaagtgacggctgacatgcagacacaatcacttaagacatgcatgatgcgcgtgatgaatcgcgtattacactgagtttattagcgtataggaggtagaagagcgagatgttggatgcaatgccgttcacaccaataagacctgtcccgtagccgccactaaattagggcggtttttattgcaaggatcagaccaactcccttaacactgttcattttcctatcggttgttcttttttgcttatttgcgtaatgacgtgataggaaaaatcgctaattcttcttgttgtatctaacgtccgtcgagatatgggcgaagcccgtatctacgacctcccatagggtatggggacgtgctaagctatggtattataatgattgtgcgcatattgaaagcaagttctttaaataaatgatccagcaattttaccggttagctgctcgtccttttccgacctgtgaaatggatgcaggaaaaagcgctaaggacttaggagagtaagatgatacattatccatgctagccaggaaccgtgtgggatataagtgatgccgatagtcctggaataaatctatgacatcatgctgattagaacatctattgatataccagatgccttcctagtgccccaaagaggtaaatagcttagactcctgcgcaacctctgccggactaccggagcggatgaccttcatttttataggctacttatatggaaaattaatgcgaaatgagagcgcaataccggagaagaggaaaatcgtcatattggctgcccgatcgagctaaggtattttgatagactgttcgacccttgatgctcgcgacgatatcttccataacagacctagacagggccatgaggaataggtagaaatcaacggaaaaaaaaatgggcggcgttcataataagatagagcgcgattccacacgcagcgagcaatgacagcacggcagctggaacagaaaagcgtgttattgcgcccagacatggacgagagcgacgagctcaagaattgcaaaggtacaaactgctccttagtcaattatgagtcatcactctagaaatatgttacagctatcaagtataccggcttgggaaagtgaaaagtgcccatcgggcatgacgacgcaatcaaagcgaacaatagctattcaaaaaaaagtgaagtcaaaaactctccgataggatgcaacttcgggaccgaaggcctgtctgcggcgaaagagcacgacatgaagcatggccagaaattgtgtcttctccatagaaagaggtatgaactgttgaaagtccaattgagaaaagggggaagagattaccagcaacatcctacagcacatactatacctatttcaatcaaacggggaataatgcagccacatttcctaaataggatctgactgggaccgttccaatgttctaaagttccaaggctgagccaagccctgggggttcctgtccaggtgatgctctgatatttgtgaatctgcgattggcgatttcaactccgtcgcccgacgatctttcttggctcgtctacctacatagacctgtatgtacatcatgatgccagatcctcggtgtagtgggtgcaatatgtcccaccaaattcaaattaaccgccagattagagattgccaaaataggaactagaaaagtaccgccgaatctgttgtccaatttttcctactttcgttggggatgaggtggagagaccccgaaactagatgccacgaggtgggggctcaatatctcatgcaccccacaccgaccctgtcccatgtgacgcatccggggtacgttggtgcctgaagaagattggaaccgaggcagtggttctgcactacggcatcgattccgccctcgttgatctaggatcaccaaccttataatttgataatcctctatagatattctggctcttgggcacatatgtcgggatcgagtatatccatcctaactctagcaagcgtgcaccttatgtagtactaaataaaattggcgaaggtatactgtaatcagcaccaagaggtgactacctcgggattaaacctcgtacagaacttcgcttctgcattgacgctgcatattttaatttatttgacattttgcatcttctaatctggctaaaaccccgcaatgccaaccagataggttcccactcccgaaccctaaactactccacactatggtacagcggtctagtagctagtgcaccaattcggatatacatacccacagcatagtttgcaatatgagttattttataaatcgaaatacaccaatatcgcttcactatgcgtaatgagttcctggctccgtgctctggatttcctatttgggaccatccccgatgtaacccacctggcgcaattccaactcctccgcggcataactatagtgtgaaaatatagtgacagtgagtacggggaaaggtttgaggggtagttgaagcattatttaaagagcaaccaaggcagtttttcttttttctttcatccaaaacagcgctcaagcagccttgctaaatatttcaacaacgttctacaaaatacttgaatattgttccaacatgttgttcaacagtcaatccttgcttgtagggatatccttgatttctcaagccctttctgcacctcttttggagtcgagggcaactgctggtgtgtcaatccaccagcccatctctgttagctaggcagctctaacctcatctcaagccagcgctgccttccctgatttgcaccgtgcagcacagctttcttccgctgcttacactggttgtatcggaaaagccttcgatgtcactattaccaagaggatttatgacctcctgaccgacaccaatgtaggcgtggtatttgctttttacgctagcaaatgactaattccaatagggattcgttggatactccacggagaagaagaagatatcggttatcatgaggggctcgactaccagtatggacaaattattgattttaatactaggtcaccttgctaattaatccagtcgccgacatcttgaatgacattgatattacccttgtcactccctcgctctcgggcgtgaccttcccttccgacgtgaagatcatgagaggtattaacagaccttggtcagctgtacacgacacagtgattgccgaagtcaaatcactcatcgcgaagtacccggattactctttggaggcagtcggacattccttgggtggttccctcacatacattgcccacgttgcactggctcagaacttcccggggaaggcactcaccagcaacgcacttgctgcttttcccatcggcaacgaagcgtgggccaactttgctagttctcagcccggtactttgaaccgtggaaataacattcttgatggtgttccagtaagacatggttgaactttagatgatgcaatgaagtggctaaccgtagcagaacatgtacgtgagcgggcttatcaacttcaagcactatggaaccgtgagtgatcctatcgagggcttttcatactaatatccaatcgcttaccgaccgtgaccatacataggaatactacagcgctggctcgggggccacctgcgtaaagtgcgcaggggaacgagacctggcctgctctgctggcaatggcatgtacgctgtcactatcggtcacttctcgagctttggcattacgatgcttactgctggttgtggcctgttttgagtaccagaagtggacacaactgggcaatatatgatatagatcgcttattttggggacaaagcgattttggatgattacttcctcgctggcgagggatgacagaaatatgtcaaataacctaacatgaccagtctcaatatatatatcatttgacgtcaatcacactctactatggcttgttaaaacagaggtaagtcataacggcgctcttaacaaagataccacgtatattttcattggttcagatctagcgcatgacgtgagatttcaacaccaatatgcacagccctggagggttctcaaagaaccagccacacagaatctcacttcagcctaagcctcaataacaggtgacttcgtccctagtcacatttgatatcacctgacccccgcattaaaaccccctcttcccattttccttccttgttttttctctttcctcccacgcctgccggagtcgataacttttcgctaagagagtcattccagattctcgaatgcagagccatcccagaactgtgtattcctcgtcttttaattaaggcacggggggaccgtttctgaggggagcttccaagactcacatgcttcgtgtgcatgactagcagcgtcaatctgtatttctttcgaccaactcgtatcactccttctgataattacaagattatttcgtcattcctgaccgtcttctatgggcatatatcggcaataggattactttgcgccgtcatgttcaagcgctctttcgtatctaaggaccgggcgggtaaaaccgtcaaggtcgccaagaagaagtacgacgagctggttaaggagaagatgaagcagaaagtggaaattccctcaatgggaaggtgtgtttcctttttatatataaatgcggacctacgctctccataaatatcgacatctatttcatgtgctgatcaatgtatccctatagcccccttaccagccctatcattactatgattgttggccgggaccagcgtctcttcgccgcccatgaagatgtcctatccgtgtcgccgttctttagtgctgctttgaaggagcagtttctcgaagacggtgccaagcaactgagtttgcctgacgagtgagacaatcctgcctattcgattgagcaaaaacttacacttgagatagagaacctgagattctgtcgtgtgttctcgagtttttgtacaagggcgactacttcccgcgtttgttgcgtggaaagcagagacactcttggtcactcgagaacgcccaggatatcaatcagactggtggccgtggatcgagcgagccgacaatgttccactccggagtgggagatctcgttctccgagacacagcagtgtactgtgctgccgagaagtacggcttggaagaactcaagcgccttgccctccgaaagcaaggtcttcagagtggtattccagccgacgtgatcttgcgatccgctcgatatgcatatgacaacacacccgagtctgattcccgactgcgcgctcattacctggctcttatcatccgcagtcgcaagactttcaagagcagcggaaccttgcagatggagatggaggaaggaggcaagttgttcttcgacctgtttgtggcgatgtgcaaccacatggatgacctgtcggagctgcggtacgattcactttctccttctccttctccctcaccctagctctctgcatatccctccgttactgctgactgctttttctatcccgagtcctgagcgcttacactcgtgtctaccagcaccaagcgatcgccgaggtttttctagacggttgtaacatttcctatgtactggatcgagcgactggactatgaaattgaacaagaaaggcatgcatattttgcaccagaatgacagcgaccttgccctagcctgcgtttttgctttgacagcagcttgaccttcgcttctctcgaggttggccgccctttttggattgaagaaccgaccttattcgcttttaatcggacccacgacgtatgttgacttgcgttcgaccactctacactccttgagattgagttttttcgacacattctttgatgatttgcacttattccactgctcttgtttgcgacagtgattatgcctttgtccctaatcaggcgatgcgttcgtttatcgcctaatttactcttgggcaaggcgcctacttagtgatgagaaacagaaatgaagaaatttggccacctcaaacaaacaaattgtagaagcatttgccctatgcatgctaatgttgtatcccatccccaaccatttttggtcttcagattattgcaagcgtttgcccattgatgcactgaatcgtggattgattttaggttttgaagcagaaattcactacgccctcttcatttcaaggaagggaattggtgttgtgaataaatgtctgctaatttcgatagttttattttccaccggagtcgctttcagacatttcgcacaaccattctcggacctttatacaaaatctcgaccccaaactccttcggagtcctctgggcacatttcgtcaagcgttgttatgaccgatagtgttcatccaaggttatttaatgttgcgggaacagacaagtttattcctatgcaataaaagcctgtctgtagcacatcagaactgcaggctaggtcagtattctctcgtatatcaattgaaagctcataggcagcttttaagtccctgattacagtcattacttgccaataagattggcttcgagtttcttaggtgagtctcggaaccctaaaacaacctaggcaatatccaggatttggggtctcttcttcacaacgacatgatttcttaactctgatatacaacctcagtaaagaaaacctcggggttatcgccaagatgatatttataaagtattgattcaattgcagtcaagaaaacgtttattttctacgacaagaagctctcgcccgtcgcttacaccgacgcattattaaaccgcgggctttgcgttgttctcaacgttgatgggcatctcaatatcacttcttctctttcatagtccatatagcctctacctgtgctagcaaaggcaataccatgtgagttatctagccctcattgcaagctgattccggcgacgcgaactacatctgcgagatttctgaccattcagtctgcgctcagaagcctgtttcctcttcttttaaaggtcattaatgatatctagtaccagctgcaattctttaaccaatttcacaacaggagtctagcttcccatcattatactcttggttctatctccggcaactcaatatcgtctttcggattgatcgcttacaagatcaatcatagcttcacttccttctgtacttcaaaaattttgacttgcataaaacaatcttccagtgatactaacgaccactgccagctcccggtgacaaagaccaacaatcatcttctcagaagagcaacgaattcttaaatcatccatgcacaacctcacaaccaagatgggacctagaacttatttgaccactgacttgaggcacctaggcaagccacgcccgctggaggctggtgagacctatgttgtccggttcaaaaactccctccgtcagtacaaagctgatgtttggattggcgtcgtgctgccggagaaattcggaccaagcagacatgtcaatcgccgccctgttggtgcccagccagttgagggtgtctggatgacacaccttaaagaccgggtttactcaatctatcttccgggacggaatatgtagtaagtttgatctcctttttaacacccaaaaagacacccaacgcggtgtgtttattgatgtatatatgtgtccgttggctttcctgcacgttttttcatctatatgtcactatttctgattgcacatatgcttgtttgtctatacagattggaagctaacatgcataaagcagatgggtcgggctgcaggatctctttgttctaaatgagaaaaccgtcaatgtcctccggcgtgcgcagagagaacaagatgctaagatctgggatgatctggtggaaatcattcgaactgagcccggactagaattctggaagaacatggctctccaggagcaaggtgctaagggcaaacgaggcaaggaactgcgtctcatcttaccgagtggccacgaaggccttgtctcctgtggagaaagcgatgaggaatctgagtccgaggaggaagataaagaggctgacgaagaggaacataaagaggctatattagatcacgccgagcctgttactgatgttgcacccaacgcatctaatgggcaatcaaccatgagatcattttctgactcgcgtgctgcacagggcattcagttcaggcaggaattgggggttttctcagatcctacccccgctacaattgcatctgattccatcccctttgcagacagagagaactctaccttagggatgacgaagaaattccagcctttcatccctctgatacctcatcccccttcttctcgcccaacatcatcaccattcattacgctggcgaccaccatgactctgaacgtgatgcccaaggttgaaaatgatactaggtttgccaaattctaatgtccattctccacgcacattcactgaccaatatgttttaaatctacagtgatactgctagtgctgttgccgatgtggcatccgagaaacccgctccagaggtctcgatcttcgacctgaccctcaatcaggctctgaagcacgtcttcctgaaccagcatgaagccgccaagatcatcgatgttttcataggtgccgtggctcttgagagacagcccgaacagctgcagatttgcgagtacctggccaatggagaattcactcctcgcctgattacactcaagaactctggcttctcccaccccactccattcccagcctttgattccaacggcgccactatctaccgcctggttggtgaccaaatgggcattggtcagaacttcaagttgaacggtgtgggcaacagcctcgatctggaaaacgccatcatcgtccttggaagagtgtacctccaagcccgtcgttttggcctaatggatttggtttaccgaattgcattcaagctccaagtcgcctggaactgttacccggagctctaccaatgcaagcccctgcttgaggtcgcttctcttgctttcaccggtaacaccgagttcgaggagcccaattgcgattacctccagtcgtggttgattcatttcattgccgaggcctccgatttgctcacctacaatgctagcgagcagttctggtcgttgttgcgtgcccatccaaagctccaggacaaggttctccacctgcgcacgctggctcacgtcaataacccggagttgtatggaaatacccgtgcgctcctcgacagtcgtggtcttggaaacctgtgatgtgcattctgatcgagcggggataacacagtgaactgtgacccccttgtctcccaggtgcatatcaagcagattggatttctcaactctgcttgcttggttcatatttcgctttctactggtttcgaccttggatcatttgtattcttgatcattttgcttttttgcgtgctttttccttgcatttgctgattatgagctccggtcatttcgatcttacacaacagaaggagtcacatctcaatggttttatcttcttttgtttccgttgctgtgaggtggaaatagtgaggccgtgcaagcccatagttagcttttatgcttttatcagggaattattcttattcaacagatttcgtctttgatactcgcagtgatagatagataggccttcaagcgtactatgtatttcaaaggccacacgcagcttgaatctcgcaagccatagcgacaagagtagatcctagtatccgcccagcaaccttgatgtacaaaccaccttgctattgaatacctactgctgggactattttttttaaaaaaattgaattcgttatgtcaactcgtaggctaatcaatggtgagaacgatcccaaagtgcatacaaatatggcggtgcacctgtgcaaaccagccatcgctaaagggaaatcgaacctcacgcctagaggaagaaaaagaaagaacaaacaatggaaagaacaaacaatggaaagaactgaaagaaaagcagaaaatcaagattcgttaaaaaaactacccgagagaaaagaaataccagttacaacataaaaggcggaagacaagaaggaggtggtatttcttttcataattggcatgactgccaattcatccacacgaagtgggaagctcgacacgaagggaaagacacctcagtagtcatcgttagtcttctcagccttgactggcttcagaggagactcagactcaaggggcatctcaacgtcctcagccttgattggcttgaggggagactcgaggggcatctcaatggcgccctcggcgggcttctcggcgtcgatgacaataggctcatcggaaatttcgggggaagcaatcctaatctcgggagcagcctcggtcttcacgatggtgcgctcaatactgacagatgtctcaggggaggcctcggaagactcctcaacagcctggtcagcgggcttagcggcgaccttcacggcagctggcctgcgacctctcttgggcttctcggtggtttcagcaacgtcgtcggtggacgcctgcttagccttgttggctgcaggcttgcggccgcgagttgccttgggcttgttctcgggggtgctgttgttgtccttggtcttgctggtggcactgcgagtgcgggacttctcggtcaactcctcggcttggctatccttggaagcatcggattcgctggtcttggcttccttggtagccttagtagcctttgagccgttggtctttgcgctaacagccttggcacgggggacagacttcttggtcttgccgttggtagggctagtctcgttgtcggtagaggagacttctttgttgggagaaacatcgttcttgggatccttcttggcgcgagttgcacgcttcttaggctcggcggcaatggcggtctcgctgtcggcagatgagatatccttgtcgacgggggaaacatctttgtcgagatctttcttggcactggaacgagtggaacgagtggtacgagtcacagtcacctccttggttggctgatcctcttcggcaggctcaacttcgtcggacttctcggtgtcggtagtctcagagggagagactttcttgctgggagtcgcacgcttggtggacacctccttaggctcaatatcgggagaggcactgatcttcttgccacgagtatcatgatcatgcttcttgggttcagcggactcggtggtgagcttagtgtcagcatcggcaccttcgtcagaaactctcttggcgggacggccacgcttcttgggctcggccttgacctcgttgtcggcatcaggactagccttctttgcaggacggccacgcttcttgggctcgaccttgacatcggtctcagcaggagcaacttgctcctcggcagccttcttggcgggacgaccacgcttcttgggctccttgggctcagcctcaatgacagtggcctcagagatagcatcatcctcgtcagctttcttagcacgagtttgcttcttcttggcgggcccctcggcagcatcctcagaatcagtcaggccatgcttcttggcaggagaggactgctcatcatcgtccttcggctgttaatgaagttagtatgtcatatatcatgaggatagaacatggaattcacctcatcggccttgcccttaccagccctgacacgcatgcgagattgtccagggcggttgcattcaatatcctatgaaggattagtcagctgatctacagtctttgagcatcaagacaggtgaacttacgcccttccactcgtcgtcttcgacgtggcccacttcgatggccttgcgaatcttggcctgtagttccttgctcatctcatcaaagccatcaatgcgagagaaatcaggatcctcgctgttctcagtgagcgccttcttgacgttcataatttgcttgggggtgaagcagcccctgcatggatgtcagtactcagggctatcatagaccttatgttttaacaaggctagactcaccagtggcgccaggaccagctctggaaggtcgagccgtcaacccagctgccgactcgcaattcacccttggcgatctttgtcttctccttggcacattcagagcctttgcagccagcacggccttgagcagcgacctctgatcatgaagttagctgtgatgtcttgaagtctgtcatggtgccttggatttgggagaggtaggtgtttttgccagaaatgccataggttagggcacaacatgacaatatcagttgtgaaaccaggcattttcacttgatacaacagatatacatccatcgaccatgagcacagcagtaggaagacatagagatatgagatgaagctacttaccgaaacggtagggcattttgactagtggtagtcaaaagtagggaaaaaaagatgtgtgagagaagttaacgatggttgtgaagtgaagtaggtacatatagttttctactagcaggtcgctggcgaacaagggaaagtgaacaaagaaagcgagaatcgtttgcacaataaacgcagtccgaaaacaggcaagttcgaaattgaagttattgtcagagtcaaatgaatagaatgttacacatgcatgagcgtcaattgactttgaaccgagtattgactcacgttctttcattgttctcagtcgaccgtgagtactcgtgagatatgaagtggctgggacaaagaacgtgtcatacccctttcggacagctgtgttttctggccaatcagagttcttctcggcgcataatcacattgtactttttgtcaggatttctttctgaattataattaatacattcgactagtgtgtatagatccgacctactagacctaaaaggggctggtattaagtgctggtaagaagatgaaatctattgttcaagtggtagtccaagtattgttaactccaatagatagctcaaaatagacaatagttatccgcggcaaagttggagtcatagaaatgagggtatcatagcatcttgtagcataatgaatgcaaaatttaacgatgtgacgagaagcgttcgcccacgttcagaatatgttggtgggagtcgatcgtacctgtcatgatatatttttagtcaattttgtagactttcccattctataggcatacgttgtataaacatccgtcatgggaatctgacagaacgtaatgctaagagaataagagtttcacattagcatcattgtctacaagctgtcctgaaacttccaccatgcgtccaggacatcgttgtagcccattttttccagacgctgtgcgacctggcggcgctaatcttttttagaatattcattcccataattaaaatccattcctgcggagattcggaattttgttctgacccattcgatagggacatagccagcaagctcccagtcgatgatatctagcgagcctgtcgagatatcgacaagaatgtttgtaggaccaagatcgcaatgataaaagacaagtctagagacatccatagacatctcggtacaattctttaggagctggaggggcttggaattcggaagaggcttggaattcggaagaggcttgggtgcagctgagagagcgaaatgcccccccattgccgtcgctccagcatgcttggtcgggtggaatattgtccgggaggggggacgaataatgagtaagaagaagcgtatttgagatcagccaagaacttttgtcaacttcttgtatcgagtcattgaggtgcggctgaggcaggttaatcgctgacatgtcgattgatgttgaggttcgaataaacacaaatattgctgtagccgttttacctatggctccccgctcaccgtgtcagtgtatactacagtatctagaagatagccgattatcaacaagctaaatagcatagaagtaagtatctcgaactaacaatcgttagttaactatacaaaagaaaatcttcagaaagggtatgccgctaaccgaaggcggttagagtatgtcgacgttaaaggttcaaggttctacatcttgagcttgttactacttactactcgcctttctcgctgctttgaataaaccaaaatctacacagcacacagtggaaatctcccagaaactgaaggccaggctcttccaccaccaatttaaagccgaagacgcgaatccctctcactcgcgcaaaccccacgattccacgcggtcgcatcacctctcctcaacccaacatccacacaatgtccgagccaggcccagagtcgatccccacaagcgcggatccccgcagcaagcggccaacaaaacggcgcgccgtgacaccgcattccgaggtcgccaaccagatcgagacactcttcaaagacccgagcaaagacctgcaactaccggatgtcctgaagccgcgcaccgtcgcgtccctgtcggcgccgccagagatcgtcaccaatgtgcagggatcgtcggccggtgcgggctcgggcgaattccacgtgtacaaggccagtcggcgacgggagtatgaacgactgcggatgatgcagtccgaggtggataacgagaagaataatgagacttgggagaaagagcgggaggagaagaagcgcaaagatgacgagaagacggagaagaatcggaaaaggagggagaagaagaagaatgcgcgtgggaagaagggcggtggcgatcataaggatattgctcctgtggagagctcggctgccccgggctcgatggtcactatggaagaccaaaatgggggcgatgtggatggccaggtggcccagcaggaagttcctggtgtcattttccacgatgaggactaggggcagatttaaatgctggctgtgtacgatacgaagatacccatctggatttggtttttttttgaatctaggatattcatacagaaggaagacagccatgaggcaaatcgtgtaacattatgtacggacctcgagtccaagtatcatttttctttttcgtctatcaatcattcgtcgccgccaccaccgccgccgctgacctgctgggcggactttgcgctgcagatgtcgtcgacacggagaaggagacatgcggactagaaagagaaatatgttagtgaaatgtagtgtgtaggaaacagtaaaagcttacctcgaccgcagtcttgatgctctgaagcttgacggcttcgggctcccaaacaccgtactcccgcatatcaaccaactctccagactcgccgtttagaccccaggtgttgtggccctcgacatgcttggcacggagactggtaagcacacggatagggctagcaccagcgttctgggccaatgtccggggaatgacctccatagcgtcggcaatggccttgtatggccactgctggacaccctcaacggagcgggcaagctggctgagctttacggagacagccatctcagtagcaccacctccgggagacagacgagggtggaagataacgttgcgagcaacggacatggcatcctgcaagttgcgctcaatctcgttcagaatatccttggaggggccgcgcagcaggattgtgcaggccttcggggtcttgcacttgcgaatgaatgtgaagtactcatcgccaatcttttcaatctcgaacagtccgcacccggtaccaatatcagactcctgaatgtcatcgacgcggttgacgatggtagcaccggttgcacgggcaatacggttgttgtcggtctttcgcacacggcggagggctgtgatgttggccttcaccaggaagtgctgtgcaagatctagtaaatctcggtggttagaacatgcaatcaatcattcttaaccaggtcgcctgcttaccggaaacacccttctcagtaataacaacgtcaggcttgaaggccagaacagcctcgcacatgtgcttgacctgctcctcctcaatctggagaatacggttccagtcatcctccttggaaatctcaatgttggtttgagactcgcccttcttgtactccagggggcaatccaggagaagaatacgggggttctcgattctgcgacgcatcttgggatgcgtgatatctttgttgaccatcacaccatcaatcacctcagagtcctcaatttgaccaccggggaccttctcaatacgggcatagcgtttgatgtcgacttcctgctttccactaccgacatcgaaggaaacggttcgcacagccttcaatgcaagaccgcacatgagctctgaccaacgggacacgaacttggttccgatggaggactggataagactgtacatggccttatcatcatgaatgtcgacgggtgtcgagacatcctccacgatctgaagggcatcggcgagggcgcgcttgaaagcctggataatgacgacggggtggatgttgcgttcgagctgggggacggcctgggcgagcatttcaccggctacagaatatcagcattgactatcgagtcctccgaaatcaatattgccatacctaggatgatgactgtcgtggtaccatctccgacctcctcgtcctgggtacggctgagctcgatcatgctcttggccgcggggtgcgacacttcgatctctcgcagaatagcgtggccatcgttggtcaacacaataccacccatagggtccagcagcatcttcaacatcgccttgggtccgagacatgaccgaatgatatccgcaacactggtgtttattgaattagcatcgagcgggggagaaaagcggaggattgagggatagcgtacgtcttggccgcggtaatgttagacatctgtgctctccgaccaacctggcgctcgccagaattggtgtctggatgatttgttagcacttaaaaggggagcaacttgatgggggggtaacctactcatcaccaccaccggagcctgcatattggcggtgatttattgtagttgagtgggaaatggatacaaaagggtcttgatcacttgtgaatatcaaaaaaaatattgcacgaagatgatgatccaagagttcggacgtcaacgctgttcgcccgcgttctattaaatttccaggcgaagtgggagctccctcgggctagtccatatacggctagcgtggggccctgacaaactaggcaaacatctccaacttcgttatctagaagtctataaagctgtagttcaatatatagtctcactacttttctcattgggtatttctataaatgttcaaatagcactgcaaaaataaaagtagtctaggaaaaccgccatatccgacctcagcatgccaagcgactaccataccaatatgtgtcttcacttggatcacccaacttgaaggacatgacgaacaccctgggcaaaattgttagcttattatctacggcaccaatgataatagaaattccaatcagccaaaccaatatgaaggataactccgctgtttcgtaaagggaatatctggatgcaaaatcacacaaaacgagcaaggataagtacgggctaacgcaagctatgaaagtagtgtacaagaggtggagttttgttcaaaattcccggctctcgccaatatcacacacatcgaaaacaccagtttcagcaagatcatgttttttcaacgcctccttgagcttcttgggaggctcaagcacatcctcctcagtaagcacccaagtgccccagtgcatgcccaatgcatttttgcacttggtatctttgaaaatgtgaacagcatcatgagggtcagaatgtgcggcactgaaaatatgacgaggtgcgtaggccccaatggggatcaagccgagatcaaatggtccccggaactcacctatctgcttgaaggcagggcaaatagggaaattgtatttggggtcccaatcatcctccccttccggtagctcgtccactgccctgtagccggaatcactagattgaggtcagcaaagcaacattctgatagcgtagatggtttgggaaagatcatacccagcaaaatacaccttgctaccgccagattcaatggcccaggaagcccatagtgtcttgtacttatcgaaaggactgcgggcagtgatatgctgacaaggcagacaactgatgcgtgccttgatatctgctgtggcggaagcttcgcctacttgttcaacctggggattctttttctcctcgggtgacattgcaatatcacgctcatcccaccaatccaactcggttacattttggatgcccgagctgtggaaccaagacttgttgccaagtggtgcaaagaaatggcaattggggtgccttttcgcgatttccgagatagttgggtatgacagatggtcgtagtggttgtgggagatgaccacagcatcgatgacagggatatccttgatctggcatggaggctcagtgtagcgcttcggacctaggtgatatggtccgcagcatggcccacatcgcgcttcgaatactgggtcaaacagtactcggagaccgctcgggaactccacataatagcatgcatggccaagccacgttgaacgcagcttgggggtatctcggctggggagaaattcgggcttgcgaacggtgacagttggaggggtggtatcgggattatttcctttgccgttgaatcgacgagtactatagttccatgtgttagagactggcttcctgcgataatcgatcggtatacctacatcatcatttgcatgatatctcttgaagtcagatcgcgaaaagatctgtcatacggagttgctggttagtctatacgaatgattgcagtcacggagcgtcacttactcccacgggttcctgaatccattctgtgcatggtgacttttcttcaaaacatcttccgggctaggtctggccggggagttcgccacagtcagcgcatatagcactgcagtagtgggtgttgtgctcatgttgcggattgccggttgaacagttcgtcgataccaagcccgccaaaggagcggataacggagaagaggtcgcatcgaaggccaaggcgttagaaaataacgccacacagaatacgctggcgccttaaggacaggaatgcgagaagcaggaagttactttaataccgataactccgacatggggccttcgcgcgttgggaacgccgataccaccggagttccagcacatccgtccccatcttgattgcttgtagaccactcaaggtacattcaaacctaggaaggttgtagttcactttctcatcgtcggtctcccatggattgccctgtgaaacgcccgtgggtacctcaaatgctcggcccgttgtaactccgatatctgtgcttatcgatcttctcaacattcgcgatcttcacgacactgttgatttggtatggagccaaatgcggtccctagcgctgcgccgtctgcgggcgatctgattctgcagcagaaaacacaggcgctacagtcggcccaaaacggcgacggaagtctcctctcgcagctaacgagcaatcccttgtttaccgcggtatgagccgtgccagtgtttcgatcccagatgatgtgctaatatggttctctgctagggatttggccttgcaggtctcggagcaggattgacactagcacagaaaggtgttcgacatggcgccgctcttctccgccggcggatgctggtggacgtcgagatcagcatcaaagatgactcgtatccgtggttcctacactggatgactctgtaccaacaatcacaactcaatgcaagcaaagccgctgcgaatacctctacctacatggaccgattcctccaaaaactcacgcccggcatgcgccatctctccatccaaacgcagaaagtcgaacattcgaacggagcaattgatacacgcttttcgctgattccgggtcctggaaaacacgttttacggtacaagaatgcgtttgtctttgttaatcgtatgcgcgagtcgaaatcccgcgacattcagaccggaaagccatgggagacaatcaccctcaccactctctattctcaacgtcacatattcgaggacctcttcaccgaagctcatgcatacgccgcgaggggccacgaaggcaagacgacaatatataacagttggggtaccgagtggaaaccatttggaaatccgcgccggaagcgtccactggagtcggttgttctccacgagggagtcaaggaacggattgtggcagatgtggaagacttcatttcaagttcatcatggtacaacgaccgtggtattccataccgacgaggatatctcttatacggacctccgggcaccggcaagagctcttttatccaggcgctagcgggcgagttggattacgacattgccattctgaacctgagcgagcgcggcttgaccgatgatcggttaaaccacctgctcacaattgttcccaatcgaacgctggttctgttggaagatgtggatgcggcgttctcgaaccgacgcgagcaaagcgacgcagatggttaccgcggggccaatgtgactttctcgggactgctcaatgcacttgatggagtcgctagtgccgaggagcgcatcatcttccttactaccaaccacgtcgaacgactcgatgaggcgttggtccgtcctgggcgtgtggatatgactgtccgtttgggcgaagtgactcgttaccaggtcggctccctgtgggatcgattctatgaagacatcgataccgacggggtttatcggaaacttttcttggatcggctccaggagcttggcttgattgaagatgaatcaggcaacaaggctgatcggtctattaacaccagcgcggctgctctccagggcttattcttatataacaagggtaacatggaaggtgcgattgccatggcggagggtctgacccataatgtgcacgctgagacattaggtcaagactaagggaagaacgaataattgtacactatcatgtaaataaatcatcaaaatatagacatccttgtgggctgcgtcctttagctcatgccccattctcggcgtttccttctatatgtctacactgtcaggctgatggcagtgcatctgcgcggttctccgtccactcgttcttaacagggaataaataaccaacaaggatgagatgcggtgccactgatacgatcgacccttagaacaagccaagctttatgacctgaagattatcactatcagcacatgtgaagtattcctgcaccatagaaaatacttctcaaatccagggcgagcaattcccatttaatcgcgcaatttcatctatcagtattataattcggcctttcagataccggtcgccatgaaatagttgttctttctctcgccgatgactgaactgactgtcttagccatcaccctcattacccctctacaattcacatccgttcctcaccgccccccgctctccgtttttcgtccgtatgtgatagcaagatcagttaggcgcttttgaagagtttaatatatggtgtgacccgtgtgttgatgtcaatcctgtttcttgaaattatccatttaacaatatccggagccgataagatgcagatactagggtcaacagggtcaacagggtcagcagggtcaaactccccgacttcttcaacgcaaaaataaccagccaatataatctccggattctgataaatatagattcctcatgagccaagcaccaatcaccacgctgtatcgaagcgccgctactgcagctgagatgtgcccatcccaggatggaggccaatcacatccctaaacggttaagcgcccactcgtataggcagggttgtcacacatctcgacaaaccatatactctgcttggtctgtcgggctgatgcgcacattcggtgagaatgggttatatctcacccgagaccccctgctttcgcgttctgtctttgtttatagcattcattcgcgaagatgggtgacaagatgaatcaatttcaattatttcctgctccatcacccgaggtcaataggtccaacaacccatttcgcaaagtcgggagaaagccagtagccacatctgagccggcttcttcgatccctcttcaggaaatcaaggaccctggtaagactgaatccttgctgcttcagattatcgaagacacccagggtattccacctccgccaaaggagaatggttcgaaatctaagtccccaccttctatggtgggagcatctgattcaaaatctcctcagtccatgcacagtcagaatcgtgaagccaagagagtgaaccatcaggccttgccttcacagggcagtcaaagcagcagcagtagcagccaccacactacgccgtcaactgtctctccgcagtcatcacaatcgtctgcttcctcagttccgatgaaatcaatgttcccgcagttcaatccaaaactgcctctcaaccagcaggtatatcacccacggcttccaaatgtgccaagtccagccaagtcttctcgaaagcctcctaagcttacgctttcgacaaatactgagattgaccatgttctcgggccaaagactgtgcctgcaagtgtgctcaacttcccaactggtgcattggagtccgaggaggttacatactcctctgtggaggaactgaagatgttatgggaaacggccaatggccagagaacacgagatcttgttgggtcattgaacctgcgcatgacaaagtaagacttcttgccttatagatgtataatactaacatctcacagaacgggaccagctacatttacgctcggaaactcccagaacccgttttacacactacaaacatattcaaccaatgaactcgctctaagcaggtgcgacccttccagaccaaaccacgatgtaccaatcatgatgatgagcctcgaagaccgcatacgtcgcgagcatcccaacgacggactcgtgaccctactcttcccccgactagcagccatgttagctatagaccaggccgacgagatcagcaagcaacaccacctcacgcccgccgagacggcggaagtagaaaccgacgcactcaaacgggcagcagcacaagagtcctgccggctctcctggaaccgccatcaacgactatacgagctacggcacccatatttctcaagaaataacccacctgctcttgtcggcgccgccggaatcccactctcacccgtgcgatcccagtcatcaggaatggtgcacatcacagtcgatgcctctcctcgccagccgccaacaatcatcgtaactggcccggtctctccaacggcactggaagccggtctgcaagctgctaatgcacgcacatccgtgcttcccgtcacggacctcgacgagccgctcgcgtccttggacttcgctacgaagacattttcgatttcgccggctgctgtggtcgctactattccctccctgtatgccattgattctctcattgctgcaatgttagcagtcgccgtctcagatgaagccacgaaccccatccttgcagacatgcttctcggatcgccgaagtcgtctagacctccgacctcccacaatcccgggccttactctatgcctgtgttccagggtaaactagttacgactgttgctgagcgccaagatacagcagagagcatggatttggcatcgcagattaaatctgcgcagaaaaagtccaaagagtcggggaagaaaagtaatctcaaattatggagtagattctcttccaagacgaaggaaaattcgaagaagagcaaatctcagcaggttgtggttgaggagtttgacctggagaagtatggtcgatatggcaatagttcgtcgcgagaggggaagaagttgcctggaattactcgcaccatcttgcgtatactgttctttggcttggatatagttgtgaagggattgacgctcattgtgaagatcttggcttggttattggtcaattcgacgcggtgtgtgactagtgagaagttctgagctgggcttgaatcttcttattctcgatgttggttactattgggttttcctttatatggaactgttcggaagcaatagggtgagttgttggaccatgtcttagttatactgttatacccaatttgatagttcttcgcgttatctttagactctaagaattgcccattatgttattcccacacagtactcaatgtccatatatatacacgggaaaattacatttggtatcgccaactgattgattgatagcatcttaagctatagcctatacctatcgccggcagatccatacttcgaggtgacatatttcgactccttggatattacatctaagcactacatatcatagcaccaaggtggtatcgacttcgatcacaagtagagaatttggattcctttgaattgaacggttaccagccatcttgaataagatccatgaaacagaaaaatgagactgtcccttgatcctttaatccaacattcttcggagtataggacctagggataagccaggaacgtcacagggagatgacaactggtagattcttccatcagtccagtacatacaaacgataaacaggagaccaagcgtacgtggggctggaaaatgccacctgaagcttcactcttaggataagcaccgtcccggaattcctagacgtcataaacgccataacaccgcgattaagggatgaagggatatggatgtgatgtcaaagcatttatttcctcgggaaataattgataggggaatccaattgtaaataaagcaccgagtattccacgaaccagccgttccctccatagcttcgttccgttatatgctagactccccatcctagtacaactacctccaagctcgcaaaccacttctccaaaaaccacacaatatccaaaatgcgttccttcatcactgcctcagtcctcatcgccggcgccctagcccaatcaaccgaagactacctcaagtgcgccgtaagaactccaacccaataaaccaagtacctaaacaaacctaacaacccacccagagcgccgccttcagcaacatcaacacctcaaacttcacctcctgcagcaccaaaacctcccaagaatgcttctgcgccaacaaatccctaatcaaagccctaaccacatccactgccccagcctgcgccggcctcgacctaacatccctcacaacctccctctgcagcaacacaacagatgccgcacccgcacgacacgcaagcagacccatgcagctcgccgacaagaagcgggccttcgcacctgcgcccgcacctgagcgcgaagccgaagctgctgttccgcacgtcgtctacgtgactgagacacgcactgattgcagctgcaagagcactccggttgccgaaagaccgatgcatgtctcgcagattccggttgatgttcccgctagcagtgccgcttctatggcggtggaggcatcttcgacgccggctagtcggctgcatggcttgatgggtggtgcggcttcgtcgtctgtgatctttggtccgcaagctacgtcttcggctgtgccttctggtgttgatccgactcgcttctcgcctttcaagggggcggctgcggcgggcgcttccgtgcatggtggtgttgcggtgcttggggttgcggctgctatggctgttgttgttgcattgtaggttgtttgaaagggtgcttctcgtttatttttgacttggttagcagttagtttatatttggggttttgagattgatgttcagatgggttcggacttggtaatgatgcatgaaatgtgttttggcagtgttattagtcgtatattatcttcaattagattaacgttcaccgatttttgctgataattcatacatggcgaaaaagcggatagacattccacctatagacgtaagagtaaaactccaagacccctgctgcaactttgtctggagagctcaagcgtggactgcctgctggactctagggtaaatctccaccagcttgtaataaatatccgggtggtcattaatcatgacctgaggatcccaagccatcgccacgaagatggtctcaacgccactaccaatgggagtcatgaagacctggcagacctgaagaccaatcaagaaagcgaaagccatgatgaccgcggtgaagttaccatccctgttgtacgcggggttggtgaactgcagatagagataggacaacagcgcacagacataggcgacgaaagtcgaacccatagtcaacaccggacccatcaggcagtcttgcacgagagcatcaattcctcgatcgcgcatcatagaccaagtatccttggctgcggggatatatgcctttccgtacaatgcgatgtgacagaacgcgtagcgattgaaaagcgtaacgagccagtccaacagcgagatgatagatcccaaaatccaaacgaaaatactgccgaccaagttaccctgtccagcctcttgtcgctgcgcgaccgagcacgcctgccgcaacatgttgatgaacgcgatgatcagactgccgaaactgatactgccaaaggagtacgtagtcgcgcgacggaaggcgccccgggtggagcccttgggcatgccgccggcggacttgctgaagaaataccacgaaccgtagacaccggcgacggtggtgtgcaccgtgttcttgatccactcactgacccagtacatggcgaaggtcacgtagacgacgaggccgatgacttttgctctgctgcagccgccgttcgtgcaggatgggttgttgccagtggaatcgggctcgtaggcgacgtagatcgagaccatcgtgacggagaaccaggcggcgaaagcgaccgttacgattccgcccagcgcgctgactacgaagatgtgcccgtaccctcgggccacgtccatggcggtctgcagcataaaggcagtgaatgggattcgcgggatccagctaatgaaacagacgattgcgaagacgccgaagatgaggaacacgataccacctccatattgcttgcgcgcgatgtaatagattcctgttgccaaggcgaagacaatgttgagaatgccggtcgcccagatgaaggtcttggtgaagtatcttgcgcccatgaaatagagccaagagaagactagggcgacgacaaggacgaagataaacaagacgagggtgttggtgtccagcgagaaatcattgctcgagtcgtaaatgccacctccgttgaagcctttgttggtggcatacttgtggatggtaagtccggacacggcggcatacccgaggaagactgcgatcaactgtgtaataggttagctaaaggaggttatcaactcgacacggccacactcaccaaaagacctgcccacaggtcgttccactttggcttctcgatcttgaacgcctggtcaaaagtgtatccagactctgggacattttggtggtactgcggtggtttgggctcagatggaggttgctgataggctggttgctggtatggcgcattatttggcggttgatagttcccatgttgctgttcataaccagagttgggcggatactgaggttggccctgagggaagccctcattattgtaatagctagcagcctgtccactcatatctgcgacactgggagaagggggaaaacaaacgaaagaaggaaaaagaaacaaaaggggcagcaagggttttttaggtttggctggatttgactggtgacgacatgaaaagaatcgcaaacctcgattggcaacgaactcagccctagcgatcgccgatctgcgctaaatcgacccgtggacccttttcttagatcgttgaagatttccgatcgcctcgtcatagtttgatttgacggagctttgatttcatctgaagagtttccatggctcgtgagaaatccacaatgtaatttggacatccggaaattggagagcaggacctacaacagaggtacaacgagaattatagtttgcccagctttgtttctgtcatgtcctgttattacagccctataaggagtagtggttaattaactaaggacatctaccaattggtaactggattgcctaaaacttgagaaatgccaagtcggttgcctgcttggcataggacttcgttacgccagcaggaatttgaagcgacttgatattgccccttaacatatgctcgcgttaaccttggaaaacaaggtggattgggtaatcacctttgatgcagccctggcaacattggcagtgtgaacaattcaacgagtatatttgacatcaacaaaacgcggactggctgtcattttcttgatcacaagattcattcattgctactctcgagctctctagtagggcacctccatagaccaacttttccacaatgcctcactggtcatgcgaatgggaaagttgtaagaaaccagctgcgcagagagcaggagattgcttgctatgcgataggcacttctgtcgcacgcaccgccgagagccgtggcacaaatgcccaaagccagaggtttgtggtatagccataatacaaatgctcatgctcatctaataggaaaactgggaatcatactctgctcaatatacagctacagaggctcctcacatagacgagctatgccttcgaatagactgatattgttggcactctctttgacgtcccactaggcgaccaattctttcttaagcacccggatgataagggcgaccatattctagttaaggaatgttacaatattgtgggtatcatcgactaggaatggacgcaaactgtctccaaggcggaggcattctgttcccgtctatgatgtggctggcagctaagttctacaccggctctcatgagctacccgcggacgaattgcagctagctgctatctttcgcgaaaagggccgcgaggatcttgccgtctgtgtcgtcgagggcaggaaggctcaaagacttttcttcgctcttggtcctgagagctcttttctagatagacactttcacatattttcgcaggactccagcgggccttcaaatttaaagatgaggagtgggaagcatggaagagcaaggcttcaaagaaatagaaagatgatgacctacttcttggcttgttagaagaagaaaaaaaggaggaaggggcggggcgaggtgagagctttgaaacagaatagattttgcaaatccatttgtccaacagcaaaagaattactgtgtgaaggttggtttcaataaacaactaaacagccttagcagctagggaaatgaatctatagcatgctctcgaatgtttacttggatatcattcatacgaaagcttcaattctatggctagcttgctgtcatcatattctgaagctctaccatcacgaatttggcagatttccagttgtccttgagagaatccagggatcaaacctcacacgaacctagtagtagtattcttccctaatgtgtggcacataattgtctagagtcgcttgacataaatcgtatgtaaaatcgggcaccgacttcatgagttcggcatcaatcacaggagtgcgccctgttcgaagacgcggtaggttggcaactatcatttgaatcgccaattgcctcagcttctggtagttggcttgtgtcgaataaagttcttggatcatttctgcaaaggagtctctttcgagacaatccatgaatgatgcacgaaagtgtccctccgctttgcttttcagatcgccgatcatgaagtaatccgccacgccatacatgcgcacatggaagtaacatggatgacactcagccaatgtatcggccacaagctctacggtgtcccgttgctcggatagggtttcgtcatttggagctgattcatccatggccagttccgttggcaggggagactctatcattggctcgtctgcgtgagcttcatcgtcaacagtctctggggatttaggcgtgcgggatcggaaggtgtagtttcccgtgtataggaattccagcatcttctcgattaggatcgggtcttgttcgtccagatcaatcgggttgtaggtttcctaaaagtcatcaccgcttgtcagttgtggtacgaagaatcgtccacaggattaacttttactaccttgaacccgctagaacaagcccgacgaaaatactctgatctagagcagacgaggagcttatgagcagagaagaccgcatccttgcaaatgatagtcaaatcgctatagtccgagttgaggtggaggctactttagcgttagttcatcgaaccgaatgtcatcctgaattggtgatttctcacctagcaataaggccaagaataatctcctggtctctatataccgaagggtctagatcactcattgtggatgatggtgaagccttatatttcttctttttcgcagccatacggaaaatgaaggtatggatatcttggtgggtttggcagattgtaaagttggatgaccaagatattattctagcgactgatattgtttgctacaagcgcaaatactgatgcaccgctgcctaaccccgcttcctttcattgaaatgctatgttggtttgggcggcaactatccctgccacagttgtaccctaggcggcgaagcctgcgactcctgctgaggtgcatgactctaggatccgctggttttaacttggtgaaggacatataaaacaacggtcacagcaatctctcacctcgataaccaacagctctcgtttccttttcaacctgacaacacaatcatcacaatggcaaccaaaaatctccagtccagtgaccatcgcgacctacttgatattatcgacaaactcagattgcaagggattacccgttgggtcgaccttccagagatcatcgtttgcggcgatcagtcttccgggaagagctcagtactcgaggccatctcaggcatgtcctttccgacgaaggacaatctgtgtacccggtttgctaccgagctggtccttcgacggggagaccggacaagcatcgacgtctctctcattccggacccgactcgccctgaagcggaacaggtgcgactccgctcccaaaaattccacctcgaagagcctctcaatcttggaatggtggtgaatactgccgaaagtgtgatggggctggatggcgcgaacaagggcttcagcaccgacatccttcgcatcgagctgtgcggcccgacccaaccacatctgacgttggtggacctgccgggtctgttccgggctgggaacaaagaacagtctgaccaagacgcggaattggtggaagagctggtgatgggctatatgaagcgcccaagaagcatcattatggctgtggtctccgctaagagcgacttcgctttacagtcggtcaccaagcttgctcgacaactggatacccatggcgaccgcaccttgggcctgataaccaagccggacacactggatgttgggtcagacagcgagcgcgcctatgtggaactagccaagaacaatgacgtgagattcggacttgggtggcatgttctgaagaatcgggattatgccatgcgcgatgccagctctgctgagagagataaagccgaggaagaattcctgtccagtggtgtctggacagaactggagtcaaatcaacttggtgcgaaaactttgggaccacgactaagtaacgtcctcattgaccatatcattctctatctttctgctatccagtgcgacgttgaatcaggcatacttggctgcaataccatccttgacaagcttggggcctcgcgggccaccttgtctgatcagagaagataccttggcaaggttggacaagacttttcgatgctcatgcaagctgccgtcaacggcgaatattcgtattattcgttcttcggagacagccgctctgatgagagttaccacaggcgtcttcgtgccgttgtccagactactttgacctccttcgaggggcagatgcgcaaagaaggcaaggcgcgagtcattttcgatgaagaatcagatgataatgagtcggacgagccagaaagacaagagaatttgtgtatgatctcacgatctgactacgtggaagaagtcaagagtctgatgagacgcaaccgcggtcgtgaactgcctggcacctggaaccccatgattattgcggagttgttcagagatcaatgtcagccatggaagaatatagtcggtggatgcatcgctgggatcattcgagctgttcatcaagtcatcaacgacatcctcgagcaggtttctgtcggcaagaccacggaacgcatacgtcgagatatcatcaacccgaagatggaaatgctggtgcagaatctccaagagaaggttaccgagatcctcaatccgcattactcagggcaccctatcacctacaatcattacttgacgactactgtccaggaagtgcaaaagcagcgatatctcaaatcagtcgaggcagctttaaggacctccgatgctattcgaaaggagaaccgtcatatcagcaagattaattatagttctctggctaggtccgtggctcaatacaccgagcaagatatggagcgagttgccagcttgcaagccgtcgactacatggaggcatattacaaggtgactttatttttcttttcctctctgactataatatatccgtctcgctcctttcgtgattttagtatatgcctacgcatactctcaaaccgccaaggactgttgttaataattcttggatacctaggttgccctgaagaacgtgatcgacaacgttggagctctggtcgtggaagcatgcctgatccagaaattaccgactcttttcatggcggacacggtctacgacatgcaagacaccgacgttcaaggcctcgccagcgagggtaaggaagtagtcgaggagaggacaagagcgatgcagaagcttgaaagacttcaaacctgcctccgggacctgaaacggttcgataagcacggctctgctcattcacggtaggccagcagctttccagactgtctctacggtcagaaggaaagtgaaatgaagcgttaaaatgctaagtcagcaacaatagtttgagaagggtgctgtaaagaagacctcgaacgactcttctgctgaatgtattgagagtgatcgggttctttttttcttttctttttgaacttcaaggtacctttttggtcttcggacaattgatgagttaagccaatggcgagaccactgctcttcttattttcagtcatggcggacacagcaatgcgatgtaattgtataccaaaacagctaatgccctttttgcttgtggaacataggaagtcgaagaccgatcacgtcaggggggaattatgagtaagcggatggattctcccatcgggttgaccctttagtttatttttttcaagaatacaaacacgcacttgcggatttttcctttctatcagaagcaagtagatcagcatcttcagacctagtagccgaggagatgggaattagtctgcgtcttcaagtccttgtagtcccctacacatttccgatataattcatgcatctgaatgaaaattacacttcataaaaagtgctaccagccccaaggtacatatattagaaagaattgatattagacaagcagaccgggaccagaccgactcaagtcatttcaatggatgatagtatagataccaggcaataaatccaggcatacgaccttgagcgctatacagcgtcgtactgagaagtgtttgaaattttgtacatatgcaagaaaatgaatgccgtaaatgctcgattcccccatttcgcctttcgaaaccaagacgcctataatgcaggcaaataactgccctcgctaaacctcgtcaacttcgcaattatgaatacaggccattgtctaagaaagacacccaacagacatggacgccgagatggccattcgcttatcgaaatgcatgttgtttcaagtgacgccaggaaccgacaacccggtgctcgatgcctggggttggtgtgttgcttcggccggcgaaatcatccgtcccagaatgaagctgacctttgctaaaagctactgatcgtcgtaacttctcttggcggacagccgtacggcgttgagctcggagttcttcgatacgaccttgtccgacgcggtgcttacgtacgaaacattcatccatcaacgtgttggcatccaacagttttttggggatggtttggacgatctggaatgcctccatggggtctgtgacggcgagtatgtccttttcgcatgctttaaagattgccaaagacacacggaagaaggtcttggagccctcatagaagaagacatcccaaactcggagagtagtttcaagaggtaaacttccgatgaaaaccgacataagccagttggtcagtcccagggttatgtccggcagccgagaattcactgtcaatggaggcattttgccccgtccggacggggttccacccatggaagcgatcttggaatagatgcccggcatggtgtccctgagcaggaccatgagaatccagaggtcaatgttcgcgccttccagactaatttcatgggttccaggcaagtagtctgcggcgataatatgcaacatccagaatgctttttcctcagggaggaagagaaggagcattccggtgatgaaattcagagattgagtatatccgattttcgggttgtgcagcgcataagcatacagaacccgacgtagagactgaatcatctgcgtttctgtagtgacattagaataactcggattgctgctcccggactgttctgcttcctgggtcacctccggtttgaaatggaggttgtcggggaatgtgcggtggagatcacgctcgatgtgctccttgtcgtcgttactcggtgaggtcatggccttcgcaacgagttcatcatactggccaaagttccggttcaaatgctcgtacccgccggcgtaatagaaccaagccgcacctcggaactctggaggaattcctttgcgaacaaatcgcttgactttcgaagactgcggcggaaatattgtgggctctgatatgggaagcccatgttccttgagcaattcacaccatttggctctccgttgcgtcacatggctggagtaggatcctttccaggtctcgtattcatccagggtcacatattgggtagctttgcgaaatccgtaaccgtctcgagggccatctccagagcaaagttgcggcggcactaatcccggaataaaaacttttgtcgagggctgtcgttggtgtgtatgatgcacatcagctgccggcgatgttgggggggtgctatcggagggagcgatatcggagggggtgagatcgcgcggagagtctggcggaacagggtccgacgggtcgggttcaggtggatgttctgggagtgcaggttctaatggtgtgaactctggaggcgattctggaagtatgggcggtatggggttgggttcggaataagccatgtttggcaaaaacaatgagtctggccttgcatcttgagaactgggaaaatgtggcatcgaggatgccggaggaacgtcgctcagcgacggatattctagcggttgtaattcatgtaggttcgaatcgcgtgacggcgggggcgttgctgatggcgctttactccccgcgtgggatttcggcgagccaggctcttcggtcacgtcgctgaagccatcaagatacatggaaatcgcgtcttcgacactcatcccattgtcgtctccataaggcgtatcaggggtatccggtgaaagatcggtgatcgagctgctcttggttaggacactgctgcgctctgttccgcttgcttgttcggcgctcgagcgccaggtttccgaattgacacttggtcgggactgattctcttcggtaggcccgtttgttgggaagcctgtcatggaaatttcctgggggctcatgtcctgaaagcggcgctccatagattcctgcgtccttgggcgcctattattcaacctagaagttgacatggatatacggagaccccctcgggctggcatagctttccgatgcactgcccgttcgaggtcatctcgctcgggccagttcggggaataggtttcaggtggtgtggcgtaagctcgagtgcgaccggcagttctaggggttttccattcgcccctcgtcccgtgagaggggccatagtgaggcggagtgagtggccacgggttgtcatgataattgtgaggccgccgctgaggcgaacgcgatctatggcgaattgcagagcggggggagtgaggtgaggatctcggagcgggatttgcggttcgcgggcgtgggtcgactaaagactccaattgaagagggtgaggaactctgcgccggccgggaaggtcgaaatcagccgagggaggcggatagcgagggtttacgtttcctgtgaccatggccacgatgtcgcacccagttcccgctggacatttgttatcgctgaaggagagctatcgatcgataaccagaaagcattcggaccggaaaaagggagattctcaacaaaagggagtgcgaaagcgctagagaatgaatgaggaatttggagaaacgaaagacacgaagtgagaggccaaattcgggagacacagcctgccagaggactgtggataaaagaagagagaaaaggcgcagttgaaacaaaatcaacaaagccttgatcaggtttagggtcaggtgacgtaatatggacaaaggggcatattgactacaaagcacaaagtatggaggatatagagtggattgaccgttagatatgtactctagaatggtatttgattattctacaacattcgcattgttggaatctttgtataaaactcgataggtcagaaatccatgtgtcgatcaggaactctgggctttaatagtcgcatgttgtatattttatacagcacttgacgccttacgccagctatatgcttcttatttcttagctcaaacaccattaaggggggaagatccgagaaggtatctaaatagacctaagaactaccaaaaaagacacaaaactgcatacggagtcagctgaactcttgttctattttcctacggagtacttagcccctgaattccagaccaatcaaatatcgcaaattaatatttcgactcctcttttgacaactcctaattcatctgcgtatggccgtggaatgttaggccgctcgaacccttccgtcttcggatagcggatgtcaactgtcaactatttcaaattgagctcacattgacgtttccgtattaatttcaagagtctatttctcgcaatgtctccccggaagaaggcatgatttgcgaaccgcacttatgtatatgtgccaggggagctgcagctgcattatactattgaccagtaccagcaatgaacccgtttgcccaatatggctattgtcgacaagcaatcagcgtcttacatccgtccgagtagctgggcagatgtaagtattattaaaatccccactgtggaactgtcattgactaacatgcttttatagggtctgcgaggaattgccgcagtttttgtggtcgcgagccatacctgtctatcctttgcgacatatctgatcccgccatctttcgcggaaacaggaaagtctattttgtttcagcggccgttctttagactagtcatacagggccaggcttgggtagctatcttcatggtgctactcgggttcgtgaatgccttaaaaccgcttcagctagctcgacggggagctacaagcgatgctcttgctacactctcgacaggcgccttccggcgcaagtggagactggtcttccccgctgctctgatgacaattctagcttggctgttgtgtcagtttggtgtctaccaattgggtagaagggtagatgcatactggctcagagcgacaagcccccaacaaagtccatctttgaaaactgccgtcgtggatctgatgcgagagatagtggggacttggatgtacggagaaaatgcctacgaccaaccccaatgggcactactaccccttttccgtggctccctatatgtattcatgaccctgttggctctggtaaacactacaccactgttccgcctctgtgcgcaaatggtcctatacacctatagttgggcaactctggatggtatgtttgggaataatatcgcggtactgaataccccgctaatcatttcttacaggtactgttggtacaaatattttcgctggcatgatactagcggaactatcattatacaacctgatggccctccggccacgtctgctcttcaaattactaccctacgggctagtcaccctaggcctgtacatctgctcgtacccagatcaatacgccgatcaaaccagatggtcttcccagcttgcatcgcttgccgaaatcatcttcccacaagatgccaacgtcagccgctactacgccagccttggggcgcagatgatatgtcttggcgtgatgctttcttcctccatgcgccggatgctctcccatcccgtgctgatgtggcttgggtcgatcagcttcccgctatatcttatccacggaccgttaatgcgatctgttctggtttacctgctgtatcttcccatggcaattggctttgagccggctttaagggcagatggaacaccagatccggagtcttatattccaacgccgagcccattccgacttgggtttattctggttatattttttatgttcttactctatgttgttcagcagtggtcgaagcatatagagccgaagatgggtgcacttacagctgcgcttgagagattctcccgttcatggggtaagagtgcggcgtggacttcgaaagagaagggagagaccttgcctattgcgtctgtacgggagttaaatgtatagaatttttattgggataattattgtgccttggcgtttggggtcgctgacatttggacttactaaagcaatatatgaattgaacctttctaaacgagacgttcgagatttacaacgtttgcaaagtggttagcagctatataataaggctgcttcccactcttgaacttgcattctcgcaaatattttatcactggcgcagtttataacgacagtaaagagtaagaatttctggacaatcgttaagcagaccaaacccagagcaaatttcggcaaagggccgagaatacccgacggtctaaacctgcgcgttctgttctgcggcgcggatatcggaatccttcccccggtgctcgtcatttcttatgacaatctggggagaccttatcgattcagggagtaaaaatccccctttaacaattgcttattgagatatatcagatttgggatcgacgagcttggtacagatcacttggaaattctggaatacaaccgcccagctcgactcatctgtcggccgtccaagacagaggacagatcctgacaacccatctgcaggactgaacagttccttcgttttccataaaagtgacgtactctgtgaatacgtagtgcggtcacataggtactgggtacctataaccgttgcgtttctaatcacattagggtcaacgggttcttcaagaagaagctacctcttaacgactgtattcattcgaattaggtagacatcagacccagcgagagcagcggagtataacgcctattccgacacagcgggatagccaggcgggctgataagttgaggtgaatcatcgtccataatgaggctaaggtcatgccgatagccagcgggaatggtttggatcgtcatatgtataggacaaagtaccaatatatatgaataagtcggagcccttagcagtaagcacgggaaaaaggaagccacttactctcttcttctccgttgcaagccaaacctctttcccgtacttgtgaatccgttcctgttgtgcgttagcaactcaggtctaaaatcagcctcaggtctaaaatcagcatgatagaaaagtgaaattcatctcacttggtagaagcctgggagataatgtctgagaatggggggaggaggtatcgaggtcggtttctgggatagggcaggcgattgtaccgtctggggcgtttcgctgacgacggggtactatgacccacaattgcctagaccccaccgtcgtcttgacccgattcggcagtccaggacctgtacagtattctagcaattgcggagcgaagcaaagcaaagcaattaaatcagaagcctcgagtatgtatcacgtgaggggtcttttcgcatggacaaaatcgtaacaaggtgatcggtgagatttggcagagaatgaatacgaactaggcctaatctagttaactatagggagacccctccgcctgattctgcttgattccgccttacacagaaggcatcaattatttctgccagacttaatagagcagttcttgaattagttgctcaaggatggtctatatgataaaagtgactaaattttgttaacggtctctatacaaattgtaggtatctaccgtcttgctgagttcaacaccaaggcggtgtggagggcggtaatctgaatcccgaaaaatcagacggtgggttgggggtcgcattagccaaagggggtccactaactatactccgtaacccttcgcgtactagttacttaccttaggcactttgaatatgtctagaaaaggacgcggtctacaagctaggtctattgttctcagtaaaaaacccgagcttgccgtatttatttcgctttcccacttcatcaaaagacatcctgcattccctacatttacgcaatgtctactatttccgccttgaagcatatagttcgtcgccttattgaacacaagattgacatcaaagacttggaaacaatcctggacaatcctatgccgctcgtagtagactcgttgaccctgcaagatttccagaagatccttagtctcaccatggttgtggataatgagttcgactttattgcgcctgtccccatcccgccagatctcagtatgttagcctggatagtacaaagaaatcagctaacctccactagaactttggctggaaaaattcgaccgcgctcatggcaccagtcgcgatgaagccctcatccgctgcaagctaaacctcctccttgtctgtgctcacgatctagtattgtcgtcttttgagcaaatccgctcgacccattaacatatagatggaacggatatgggcgtatagccctgtgaaatggaaggggaagacatgggtactgtcggggcggccagactacggcatttggtacggagaggaggaagacatcgacttaaacgttgtcatcatggaggccaagaaactggccagtggtaccgtagggattccgcaggcgctggcatatatgggtaagtacatcatggtatcgtcggcataatgcactcttgggctgacctgtcaaaagggtgcgtccacaagcagcgcaaagaacttggcaaggcagacaccactgtctacggaatttccaccgataccattactttcacgttcatgaagctcgacaatgagtctcgggtaagtgtatctaaatcgtgtcagtaaccctgattttaatgtttaccagtggtcattcaaaatggtcggtgtcgttggaaatgggttcgaacaagtgcttggtctgctagtctacctgatggagaaagcagcttcgatatcacctgccgcctctgaacacacgtctcgccggacacaagaagaatcatgggagtctgacctgatcttcgactatgaccctgagatggatgttgagacagatgtcgagacagatgaatggtttggtcccgcattcgtcctctaaccttcttttgcgtcttcctgctcttctttgctggtcgttcttccgtcttgatatccttcttcgttagttgactacctagttcccgcggacctacttggggaactatataagtaggccactcccccgagtcagacaatctttcatatatatttcaggatatcgcgaaatgtcctgacttgtaaaaatgtctcgcaaaaaggtctaattaactgctttcgcctctttgaatcaggaatggagagacccatccgattctcaattcagcatttgaagcaagataccccggctactattgatgatgggcagtacaaggtcctcaggccaagggtggttttgaattcggcaacaaacaaccagggacaagagtttggtacttcgtcgggtgtccttgttcaagacacaggtggttataggtacatggcagctgcctcacatggattctctgtagaggggaaggtttatctccctagtgcctctggtcttaaaagagaacgtatcattgaacttacgcataccgatattgcgctcacgacagggtgcagtttgtgaatgaaccattggccctagttaaatatatagatgctgttcttacatacaagagcgcaaatatccaaaatgttgattgatgttgaatccttgattacttactgctcttgccacagtgcatgggtcgggggcattatgcctttaataattggcactagactattcatccgtatgggtttggtgaggaacaaatccataccagacccagtcgcgtcgcgttgcgtgtcggcttgtgcaacgccagtcaaggcagcaatcgtgacacggggtttggtttccagtgttttctcatactcccggattcgcctagtagattccaggccatccatgactggcatggagatatctgtgaagattattagattgacaatgcccgcgttaatgtttaaaaggcctacccataaaaatcattccaacggcagaggaattcgccttgaaaacctcgagggcttcttctccgttttgcgcaatgacataatcgcaattcagcttcttcatgaaggcaataagaattctgagattgatctcattatcatccacaagaagaacggttgttggagtggttgatatggggctattttcttttttgatgggtgtatcgtggctcgtggtggcgacttcttcggatggaaaaagatagtcgtcaacattctcccgacagagtctcaaagattcgagctttgctgtgttggcccgggtatgtgtttttggatctgctatcacttgggtcgtggattggtcactaccatgaccgtttgacgacgggctaagaagcgagtccatctcaggctcatcggtgctgatgtcggctccgaagctccctgagccacccggtctgcattcttcgcctcggagagaatcaaaccgcacctgctggcggttgatacacgattgtaatgcttttgccaacttgcgcggaccgcatggctggctaatgaactcgagcacatttgtatcgccacgatttcgagctccgactgacatcgagtgcgcgaccctcggggacgggcatattacgatgaccggcgaagggattttaacacctggactaggtgcaatagccctgatctcctgattccctatatccagatattcgtgagaagatatgtataagtcacagtgggcgaattgtgtttgtgaagccccaactaaaagaacttccatggagaagcaatctgcacacagcctttgtaacgatgtgcatagagctgtgtctaattcagaagtcccgaagcctaatattccaatggtcttcccgcatgcaagagatttcgctgtggtgatgagagactgattgttcaacttgtcaagattgtccaaagcagacgcttgattaagaatcacagttgccacgacttcagtgccaacattcttcttggagttgacctggatgtcaccgccaagggatgcgagtaatcgttgtgtgatgcttaatccaagaccattgccggttgtcatgctatcttcctgtgagaaagcagtgaatagtccatttttcaaaaattccgggtcaatcccagatccagtgtccttgacagtcacggtgactgttgagcttgtggcgtcgccgctttttccaaaattcactggagaggccttcatggagatgtagatataccccttgtgagtgaatttcaaggcattcccgaagatgttggtgaggataacattccaggccccagcttgtgtcaaaaatttccaactgtgggtgcggtcaatatccaagatcacctggactccaccccgtgtatcggaatgtttgctaccgaagatagaagcgccggcaataccccgaaggggagatcttgaacagctgaagaaggaataaccagcgaagaccgtttcaactgcgtcttctaagatagcatcaagttcgacacaggtgtcgacatcatttgttgaatgcaaaggagggcgggctgcggtaattttcgggttgacagaaattttaggaaaacgaccaccggggagtttggcgacagagtttggtcgaacatcattgatactagcatgctcgaggagttgattgatggagcctagtagtgtgtatgcacaagaggagattgtatgaacaaatcctcgttgtagcgcgtccatggcggtgtcatttaatagttctgccgttccgaaaatcccatgcagaggcgaccgaagttcatgactcagtccggagagcaagtctgatgttgctcgatcggcgaaatgagcgccgagtcgatgcacctccgccatgacgctagttccaaatgtcaagaggaatgctagctcatcattcgaagtgaagacacggtggtgttcttttgtccacgccagagcccccgagtaccatctatccttgtgcgaatcccataaaggtgagaatatgatgcttcgggattctggggcaattcgaagcaagctctgggcatcctggcgcacgagtgactttcgtgttcttttgtacctattgcccccgggacgtcgcaaaaatcggttgaccactccatcactggtatcatcagacgatattgtcccatcttcactaaaattgaagatcttcccttggggatatcggtgcaaaaggcccccgaggaatgactccgacaatgcgattttgttatcgtccaacgactgaccattgatgctagagacatccgaattggcaaatccgagtatttcgcacgggttcaaagtagttttgcctgagttttccgcttgttctggatcagaaaagatctgatcttcgaatgaaggttgcggggagcttcggaatgtggcctcatcacccgaagaacagctctcaaacccactgccttcagtatcagactctgcattgtccactaaagcttcctgggagcggaaattggcgttgaaaaagacaactgcctcaacttcgatactctcgcggacgagattggctgcacgtccaaatgtttcattcactttagcagtataatcatccttcagtgatgtctggctttgatcactgccagttgtcatagccgcttgggaagtttcttcgagttttggtagagccttgtcatctctcttggtagtcgagttgaatgaatgatatttctccctatacccttgcggggtcttttttctagggaaatgaagattgtatggacgggaagacaggtggcttggcatgccattctgagccacggtctgagtgacatcattcaagacctgcttttcttgctgttcacgattgacatgcccttctgcatggtccattccatcaaacatggggtgagaggcgtcagcgtcgagaacccatgacttgcgcagactaccctttccctccaaaaaacttccaaggccaaccatcatgcgctcactgcggaaacgttgggctttggagtgactagttcccagatagtccatgacggtagctgcgatatcgaccaggaattggagtgtctcaccgcccaggggctcgggctcgtgaggttgatcgtctaagatcgtataggctccaatcaccacacctttcggactgatgataggactcgatgcgaggaaccgaatgtttggaaatgaagtcacatctggatgatccttgaatgcattatctttggtaagatcgggcacaaccaagactccgtccctggcatttgacggatttggcgtagaatgcataaccgatttacacaggctgcggtcataagacatagtacaacacccgacccaaagctcgtctcgcgcattatgctcgccatcattctgcaagctcagggttcgagtggcttcggtgagaacgtgttgctcgtttcggccgaaaagcgagatcaacgcacgctgcgcatctagtcgcaaggtgcccaattgggcgaatgccgtcaggacagggtcatctgaggatcgagcaacatgttcttttgatagtgtagcaggcccgacgtgttggagggcgtgtggtttgagatggtagggcggtaaatacctaggaaacaaggtgtatggttagcctacagggtcttcggtcgagtgttatatagatcacaagaccgatgtatgagtacaatgttgcgtttacaaacaaaggtggtatattacttatagaattctcgctctctggatgtgccaaacttgacctgatacttctgagcgtgtggtgatgtgattggacgtgacattgcgccggcggcagttctgatatattgaatgcaataatgctaaaaagacagaatgtatgcttcgcccttggaatagcttggcggatcatcaagaaggctgcaccgggctctcggacttcagaaaatgagtagaaaaagaaagaaagtgagcggggcggccagacgagcttgcagcccgcaagcttccaatcttagacggctgagactttcggggttccgagattgggctcggcctagccaatagattagataagcggtgacatgggacgggaatgtttggcagaagacagccaatcagaggtgaacccgacatttaagtctatctcggctatgctctgtcattggtccaatcgggattgcaagatacgtccacgggttacaagccagtagatgagatcatgaagcaaaatatgatatgtagaaggagagtagaccaagactgtaagagtctactattacgagatggaattacagcccccagggtccttgagttctgcttctaaaggcgcttccaaggttctttatttagcatggcgaaattaccaaagagaagcgtggcaaaattagaacataactagcgattagttatgtcttcaacgcttatataataatgcatgcagctgtttaactagttagttaccatgctaaccgctggatgaggtactaacttgatcttaacttcgattgagggctgcaaaagaaagttgaagctgtgcaattctagaacataaattcaaaaaaagaaagatttattgacttgacatgaaagttgttcctatctgctataacaatcggcaatgcttcaggtagggggttgccaatcttatcccgaagatagctgtcgataacagccaggaaaatgcaagggggagactccttcatatgatgcgctcgagtatcgcgcatagaaatatcatacatgccgacatcccgggcgagaaccttgagggcttggaccaaaaataacctcggctagatttacagtctaattacgatactaacagatataacgcacaccattataattcacacctcgtttaaaggctctgatattcaattgctagctaaaagacagccgtcaaggtcaggccaacccatgctatttgacatcaaacaccgaagatcagaccaaacaaacatacccactgccaattccagcggagcccttatctccatacatctctcacagtcgaacattctagctatcgcaagacgaaacacggaagctacccatgttcctgctcaaagtgtggtcattccagtcatcagatgcaattccaatctggttgctgcaagacttgtcgctgtagacacgaagaacacaatcggaccacaagttgttctcccagtcaatagtgtcaccgcttttgcaggaggacttagtgcagcccttgttgtcttcgctgtcccactgcccgctgcaggtggtgaagatccaggcgttggccataggaaggatggcggcgatggcggcgatggtggtggtggtgaacttcattttgtttcgaagttgatggtcgggtttgagtggttgaaatacttaagtagggagttgaaaatagatgtggattgaatctttggtatcagaattgagatggagatttgattgtatctgaggggatgtcaggagcgtaaaagcaagggcaagtggttatttatatagctttctaggtggtatcgagtcttctattgataaattgaaatatgtaacttcatcgatgcaatacgagtgctaggcacaatacgagcatttgccagtgaagccgaaatagaaaacacgagagatcagcatcgtcaacggggccatgattccaatctccagggtcaaatacgataactattaccatcttcagtggatgatacaggtgattggtaggtacctagggagtccactgtctatagggcggaggtggtgaggtagcgatgtcgatcagaagtgaacatcgctctatttagggctagaaaaatgaccggggaatagatcatctatagcttctcgtattctcattttgaaactcatctactcaaagcagaagatattatttttggatgacctttataccatgctgccactcgcccaatacagacctgcaattgataggaggactaggttaacatattatgtctaggaaaaatcgttatcgtgaagatatttttcttcaagctcaagtatgatccagggtctatttatggatgtggtgctaacccccgcataaatgatcgacagggtccaaggcccaatatgcccggacaatccatgtcatatattttaagccaagactcgggttcagcctgcttctcttggcatctcgtgttcgtggagctacaggaatacgaaacgtaacacaacttaagaaatacctagtatgacgcacttggcatgtctgtcactaaaaataaaaagaataagcagcaacagggacagcagatcttcctgctgaatctttacaacaaaagagtgcattcaaacgagattattaagtacggggagagaaagaaaaaagaagggaagaggaccggggctgtaaggttattgtgtgtcccttttgcaaaccatgcaaatccttaatgcgctcgctttgttccatacgaggaaggaaccaacaatccttcagatcgtaacaagccggaagtccttaatagtctatgccaaattcaacgtcgctttacctctcatggatttaccgaaccggtaaaatatcacgggcattgggatcatagccagagtaacaaagcccagtaaagaatttccccacccataacccagcgcctggtacatgtagggaccagccaggggtagcaacgcgccgaacaaagagcgactcacggtaatggctgcgactgcagatgctgcatatcgtgggtatgaatcaatgacgtaggtctgcaaagtcccaaaaatacccaccatcccaaatgcgaatgggaaaagcccaattataggaacaatccaatgcgtgtgcgcttgaaccgaccatccgtaccaaaaaaatgatattggaatgaaaaaggcgaagaatatcgataaggggagacgcatttctggttcaaaactgccattgttgcggctcttaagtcgcagaatgattttatcactcagcagagcaaagagacattgcccacagaaaaagccgagaccaagcccaatgtatgacagtccactgatttgaatactccagccataggtattctggaaaacattggtcactgtggtgaagagaaggtagaggcagccgtaaaccgtggcgatatacaaagcaatgatcgacacgataggggagcggaaaagaagctgaagaggggtttttaacccatttctgaggcgatccatttgctttctttgaggacccccctttttttcataacaactgtaaagatcaggtcgttgaagctctgatcgcaatgagtctgtcttgcgctgcatgatgataattgggtttgtttcgcgattgaaaatcgctacaagagttgccactgtgccacccacaattaaaagaacccagaagacctattttggttaatttccatcttttgagtagtcaaggaagtctactaacccatcgccatccggcgccgtgggcaatgaacccaccacaaattggaccaagcactggcccgaacaatggcccaaaggaaaatattgacattgcgagtcctcgctgctctgctgcgaataaatccgagacaacaccaccgccaatggtcaagcatgcagaaccgccaataccggtgaggagacggaagacaatcaatgcagacagattcggggcaagggcacagccaatttggaaaaccacgaagaaacaatttgcgacgctgagtacaattctccgtccgtaaatctcgcttagcggggaaaaaagcaaaggtccgctctgcgctctttgttaggtcaatgtcatccagagagcgcccaggaccgtaatatacttactccatatccaaatagatagcctgtcacggccaatgactcacgaagcgaagacttattgccgaactctttacttgcgtctgcaacggctggagcgaaaacagatgatgcaaatgggcttcgaggtaggtggtcaggataatggacgtataattaaagttggaagaatattgcatacctaatcaatgtaatgatgctgacgagtgagagaaggaaccactttcgtgtagcagggtaatttctgtatgaccaattagatcttaacagctgtgggataacgtaaattggacgtaccttgggttgagagggtcatcttggctatcccacccaactatgccggtttcaagatttgttagggggaactgctcccgcttgatagtcggattcacctgattcaaaccagccaatcagtaaaatcaacgagaaaattgcatagagcagataaaatcactttagcgttctccatactgattactatcagttgtcgattgcgattttgtggactcacaactgtcgagatacaggatttcacaaatcttccgtagacaaaaggagtatctgaataggtgacatatatataagataaaaatttaccatttcaaacaatataccattttcggaaaacaaatggaatcggacttaaaatacgggctaacctaaaaagcggactccggggaagtcttgggccgattgaagaatgcatgggctttgccactaccaacgtgccgcctcagccgagtgcgacagagtgcacgatgaccatggatcgctatatttctaattcccggctaatttgtcttttgagtatagttcctgtgcgtgcctaccacgactagttccagacttgtcgagatatctagaccactatgatttggacgaagctattattcggaaaagaacgtggaactagcatcgactttctccagtgatactgaatgctgtgctgattagccatgagcggtatttataagtacatcggtttcgttaactacctctcgtctattctaatttgacattggcaatataacctatatgttcatcgcagatacaacttgagtaactagcaacatggtttaatcaaatgaagacgaagagttacaatggaaaaaccaccctcccgtttcctccagcacaaaatctgatcagatgcgaggtcttatgattcgagaatggtgacgaggtacagaagtccatcacagatgcacattgaagaaatcggcaatttgttcatacctggcgaagttattaacgataaattgcgcgcgttagaatcatcttgcttacccccttgtgaactccttggaattctgctcattttccatgttcgcacgagatcccatccacccatggaacattgtttcgtatagttcaaattcaacatcaacattagcgcgcatggcttgctcatattctttcaaaacatcggcttgctcttccggggacgataggcagatgtgggggatgttggtggctttagcgtccgcaatatcaagaaggctgaagcagaacatatcaatactgaagaccaaaccagaccacaagagactcacgatgggtgggcttggccagaaaccttaaaataactccgaccaccagaagccaaagcagcaagctgtccaatacatcagtaaatttttatcgtcgtgggataggttttatccataacctacctttcctccccagcacagtccaagaacaccccaactcttgacttgggggtacaaatcctcgctttgcttcatgatatccagaagagtagataggtttttttccgggctagcattctccccaaagaaggtcatcatgttgtttcgcttctcctcggtgtccatggcgacccaatccatgctagctgccttgcctctaaagaaatccggaattatcacgagacattccagcttttgtgcgaggatagaggccccttgtatagtctgcgggtaaagaccgaaaatgtcatacacgagcatcactccacgttcagatgaacggtcacccacgatatctgccaatttggtttcccgaattagctacccatatgatttctttgcttccttcatattggactcacgcaaacggacttccgcagctacatcagtgccttgctcggtagatatgaccggctttccaatggcgggtgttgaacagcatgatttggaggacattttgggtctttgtaactcagcttcctgtctggctaacgaaccggacaaatcgagcattcagtgttgggactctatcgtgggaggcactaggaggtttatataagtgtcacagcaagtatccatttgaaccgcttcgtcatttgtccgtgcgcaaagtctcggtattaccggacttaaagggaatcgaaagtctgccggactctacaaagcattcgttttgtaactacatttagttcaagagctatgtgtagtcgacatgtcccttgctcaataccagaccgtgcatcactttgatgggggtctctcaccttctcatcacccaagaatgcatcctgaatagtgggatagatatttttctattttggagcatcgatttcagacgattgtctttcaaacatgacccttgaggaaactctattgacgccaagaattgagctcggaccgccatgaaacggcgctaacccaaaaaccggacttagatagcacgtcgggattttgagtctcggacgcacttgcaaattacaccgtgaattagcgctatcccaaaaagaaactgggcaagacattgactgtgaataggcgataatattcccatcgcttaataggccaagtaagtagtaatacgaatggtgaaaaagagtatttgttgaaatatcagaaaacctatgctacttgtattcttaaaggctcataatcaatccaggaagaggtttcagtattgtggcattcttcaaaagcccgtgccctgaaatgcggccgcttattgccgagtccgtcgcatgtctgagatgaacagctttgtgtataagacttgatccggatcctcgcgatagaagagcattgccattttatctcttctggccagcccttccattcatctgatccacctgatctgacctgttcgcactttcagggacaatcaagccgaaacataatgcaaaatgttctttttttcttcattgaagtcgcattctgtatggtgaccatcgtgtcagctcagatcccagagtcggacaccgttttacaagtgcagtacgggagtgtcacgtttaagaccggagagaagctgaggttaagtggtatggaatagtaacaaggcagaagaaagaccagacgaagctgatagagccgatcttattccagacattacatcagcccccagtattggtctctcagcacctgccctgacaggcacgtatattgtcatcatggtaccgccttcctgtccctattatacccatccacttcctcgacttaactcaactcagatcgatcccgacgcacctgaccccacacttcccatcttcactcaggttcttcactgggtacagcaggaccttatcttctcgccaatggccggaaaatacaatacattcgttccccttattactccgtcacccgcacccgctgccgctccgtacctaccgcctatgccaccaccactcttagctccacataggtacatccaaaccctattcagacaacctgctgagttctcaataaatgacctcgatctctacctggccgactctatcttgagatttggatttaacttatccagatttgcccaggaaaatatgttgggggagcctattgcatcaaatttcttcttagcgggagacgagactatccaaatcaggtgatagacttgctgaaataattcaaactgcgagtttcccatatttgccttgtttatcggtccttgggttggtccccggtctgaatagccccttacttaagcgtcaatggaaccggaatcatttacacatgccgtaggcaccctaggcaattctaaattagattaggaggaatattaacgccagtaaatccgcaatatccgctataaagatgggttttccaaacccaactgacgattaataaccaaaacatgataaccaagtccaattcgattcgcgacagtctcgtaaaactggagtgggtctatacatcggccacgctaacccaaaatacggggtttacttactccaagggtgaagaacttggcggctgttttcctaaagccgcatgcttaactccgggaggcagtttcctgatctggtgcagattaaggtctagtctatgtcgttcggattagacctcgtatgtaggccttgctgagatggaattatccccccggtatcagatcaaaatgagtcgttttcttacacagagtttaaggcttccgtagacgtaaatgaagtgtgcataagaaaagggatgcaacggatgtgccgtgcttgccatattccggttgtcacgtgatagtatctgagataatgacgccttggggtggcaggaggtggccttttcagcttcatgaatgcccagtacgattaccagccatcgcataggcggcccttttccccctgaaattatggctacccacagctttcaactgcgtggaaatttcggccttggtggaccgtctctgtcaagcaactcttccgagaacacccaccaacagaagcagtctcggcctggaggatacgaggctaacacatctcccacaaatcctgatatccagcacatgtcagtccaaacaaccagtaaaaaggtctcttgtacctcctgccgacaacgtaaaatcaagtgtgacaaagaaaatccatgcagccaatgcacatcctcattttacggtaggacgcaatttccataccaaaacaaaacattgcattgcactgggaaaacactgatactgaaactttgaagattgcatataccccgaatcttcacgtaaacgacggcggaaactccctttggagcgaatagagtcacttgaatccagactgaaagcgatagaatcatccatctcaacgaacgcggaaagttcccccatgattcctagtcccattacatcggaaattgggaatattacgaataagactcctctggctacaccaaacgaacataccgcgcccgcagagcttgggaatcgtgataaagtataccacgccgttgaacaggatgaaatcgagtttcaagggtattctgcggatcgatcttttattcagtgtctaaatgcgaagctaggtgactggcgtggcggtgatatgacttggcaacagctcccctctcgtatatcagcgccagcattctttgaagtcgagggtcgaactcccgctcgagtcactttacctgaaagagatatcgcagccaggctggtcgacgcagctttggatgcacagatactactctgccttgtacaccgaccaagctttgaggtttctttcaacttggtctattcgcttgaagaagccaactacagtgccaaagagcagaaatttctaccgcttctctatgccatatttgcgtatgggtgcctggtcatagaccccggctcgtacggtcccgattgtgataaaaaggtgtctcaggggtattgatttccaaagttttcccgtattcttgctcaggctcttacataaagcaggttggaattctacgcaaagagtcgacaactccagaatcttgccgagtgcagagatttaacatctctccaagccatcatgtttttgaacctctttcttctttcgtccaaccgaatatcgacgtgctatacatatctcagtgcctcattatcgattgcgctacgcatgggtctccaccggtctctcaaaacgggtcaggatttaatttcccaggaaatgagcaagaggatattttggacgctgaggcttcttgtcaatgacgttgccaccgcaagcggtatgcctgttcttctgagcgatgatgaaattgaccaagagcttccaaaagagacaaatgacataaatattgaaaagatgaggatttctccacagccgcgcggtgagatatgctatatatccggtgcgaattcatacaagcgactacaaatggttagggacaaggtgacccactgtgtctactctctcaaaggccagaccacgtctgatatgaatggtttaccaattcatggtgtgagcttggcattgatacacggaatacagggtgaccttgacaattgggtggatgatatacctatgggttatcgtcttgggacctgttacaccgaagccagattgataaggtaggaaatttggacatcatccttcacttgcgagagagcttgctgatgactcccagggcccaatttattctagctatgtcatatgctcatgttcagctctatctctatcggcccttcttgcattatgctgtgagatctctcaacgagcaggttggtatgtcaacttatgcgactgcatcggttcgggctagtgaaaatattatcgccctgtgtgaagggatgtatggacaagatctcctcaagggtgatttgtggcctgtgacgcacatgttgacaagctctattctgacaattttgtattttgttgtggtttctcgagcctcgcctaaaacagacatgcttcttgggagcttgatagctgggcgaagagttctaaatcaccttgctgaacatagtcttttcgccaatcgaggtaaagtcatgctgacggtgagcattaatcagcctgtggctccttttgtcgctgttcactaacatgtacaataaagatcatgatctccaccctcccgggaactcttcgacatatccaagaaaagcttcttcgctcggatacccaagaactccccgggcttcaaaatgagaggcttgcgagctattcaggtccttttgataatgcactcaattcccggctggcgtctgaaaccttctcgctgtctccaaaacaaagtcctgtcggctcattgccagcctctaccgccgctgagtggggagcaaaccctagtaaatccctcaattcatcaactgtgctcagtgatagccaatggaatcccagggtttcaaatgcacaacattcgacaatcggtactttccagcaagacttggctggaacatcggaattttgcaaagctcatgattcctcgaatgaatcaaatagccatccgattattggggaagaccagacctatcctcgaagtcagaacttggaagagatgggagttatagacgaattccttcaagctcagccgttgaatcttcaacaagactgtattgatgagacttggttcagcgctttgaagatggctggcttggattgttcagatgactttcagagttctatttcacgcttggaatgtttagagcagactttcgatttcgatggctgattatggcgcaatagcattatccccagagttaggggacgagcaattgggcattcttttctccggcggataagaggggagtcgaattacggcgaagtctttggcgatggttttggggttggggcttcgcaattgtcccttcatatgcctcggggcttaatgggatcagcttgtgtagtagattcccacggattaccacaccaaagatccagaattagggattacacattgttactcaactcacggcgccttgccggcagttggaatattggcttgattatccacatgtatgggcgacggatcggaccactacgacaaaactaatttttggctcaccgctctaatcaccgcctgtatgattatggtcttgggcctgtatataatattgcaacctccatcaattaacattgtaccttttgaagagtagattacctctctctataatggcagcactatatctgagagaggggagtgtactatgtgaagaatgcgtatgctctggaaaatatcaatttgcgtagggagaagatggtggtatgtatgtatgtatctggtcgacaattaataagaaaaccaagttaagaataactacacagaatgtattaatttgtataatacaaaggcggaaactccagcggtgaaaataatatatgtattactaagcatattccagtttggcccatttcggctgccctagaaattcttgacacgaagattccgaacataatctacgttacttagcgtgatcgctggaatcgtgactacgtttactggatcctcgtttgaaccttccgacctcacaatgcctgcactgctctgtttaaaaacaatcccatcacgtggcatccgcttccgatttggcgacgttatccccacctcccgacctcgcaatccttggtaatattatatggagacactttagagtacgtagcgacttccgtacatcaagccaattcatgtcgcacattgcttgaaagtgtggtagcagcttcttcgtgcaattccgcaataccattattgggtacctcttgaattagccccccgtgcacttgatcagtaacagtgctatggccatacaaatgatcggcagggtctgactgtgaccccccggtgtatcccttttttccgggctcatcctttcggacggcatcataagtctgatctttccatttgcggaagccccaggagatagcgccaataatgagtgcggcgccaccgacactgccaacaactgcactcgcgattactccgtcagaaattttatcactgtcaccgccaccggtagacgtgtcattggctttggaagcagcgccactgtcgttttctgtgttatttgcaacactaccggaagtctgtgaaattatcagattggacaccaggatattcacgacgttcaatgtgttcccgaagctgggggcgtagtcataaacagaagaggtccagtctgagccgcatacagtatgattgcttgtcccgccgcattgctgtgctagcgtgatggctgtgcggcgtagtttagcattgatcctgttggcgacctctggcatcaaatttgatacactcgaaagccataaggctaaaaaccctttacctgcctctgttgaatatcgggcctggttcaccgcaccaagtccatcaaccagatcccctacttccactatcatgttccgggtgaaaaatgatgttaaggtgttgtccaataggccttcgactcttgttttccatagatcagtatccgtctgtacctaccttgtcagcactctatagacccttttggacgacaaaaagaacaacaggagaactcaaagagcaaggcaaggagcacttctctgcggaggcaactcaccattttgaacatatacgcagcgccgctcagccacagtccataagaggatgctaacctccaatccttcaatacaaaacaagcagtattgttatccatcccagcaacaagggaattgatcgtccaatcgctctcgttcaggatgtgatttttcacgctccacgaccaaacagccgaagcccgatccgcaaaaaaacgtcgttgctcccccgacgaagcgtaagcaattcgggaagttagctggaaatatgtaccagtaaggtacccaaactgttgcccgatgaggttttgggagtctggtgaaagcccatcggtacaaaagtgaccgcttttccacatgagtttgctgtgcagatttacagcgcaattaaaccaagactccgacgaatcggtcggaaagcctacttctgcggcggtcatagcggctagaccccagatagcggtgcttggtcttgtgttggttgaattgtagctcgaattgaatattgttggtctttggctgtccatgcggtcaatgacgaggttgttgtaattactgttcttggtcgtgtcccagaaagcgagcaaagtaatgtataccgatgcctcatcctttacaccgtgaaaaggatcatcgcttagagggctcacgctgccgtcgatggtagaattgctgagaaggttcgtgacttggattgtcgcagcattttgaattgattctgggccctattagttcatgtgctaaaccatatgacactttcgtacttggcaacatacctgtgctattgatatctaaatcaatagcagaaaccctcgtgaggctgctcattaaccatgccgcgtagcctaggtggcagtaaatcatcgcaatatggcgaacggggatgatttacaggtaacacgaaggagagacgcgattagggatcaaataaacaatgcgctgccgcgtgtcttacgttacaagatgtattacacccttacctgcgttccaatcagggtcccactaaagtggttcgttcacatggtataggtaatttcgcgggtgtcgtgccaactgatttgatttttcaataccgtagatattttatcttaaaagttattcacattaccaagctgggttgaatacctggggtactcattgaaagcaattcaaaacgtagaacagaaatgcagacagctgagttggtccaagtcacagcaattagatccggacatgtgatttgaagcctgtaaccatatttcccgggttgtatgctatggcagtattctgtaactatggcatccttataatttaacattcctagggagttgtgacagtgatgttcgtgatcgatcagctttgattccacaacaactctcacacttggggctttgcggaacctcacctaaagcactctagtccttattaggaccgcgactcgcccaaatctcatctaccagtgtacccttgtgagtcaggttgaaatacagatgtaattaatatctggcgacgtgccaatacactggcgaattgggaacggtacctcaaagaaatgtctaataactttgaattaattatcgtaaggcttagccgctcgtttcgttgataacgtcaaaagctcgaaaagttgttgcgccaactacgttggattcacattcattgctcattcttagtggaaggagaatcatacggtgcagtgcgtaggtttataggtactggaaaaaaacacctagctcgattaaaaaagtgcgcaattgtttcaggtctaaaaaccaatcgcaggcaatcaaaaagcgaatccctctgtcccttgcgacaaaattgtcaatgcaagggccacagtccccattcgtgcatataactaaggaggtcgccagggttttatggaaagattatatattgcacatttagtgtcacattcctcacttccaatgctattgcgagtcacattctcgccagctcggtcaacttgtttgaggtgcttcagttttcctgtatgactagagactgaagttcttctatgatggtaaagcatccagtataggagtaagttggttaaaacttctggtggtggaacaaaaagctcatttagggcagaacaaatgactttgagcgatttattagtgccctcgggcagtcaacagggacaagaagagttatggattagcggcaacggatcacctagcactgcggtcttatacggaacgcattagaccgtagcgtcaaatagagcccgtcggcgctcccttggacggacgcaatgtgtctttattgcactagtttatatacagagggaaggcgggagggacaaaatcaagtcttgactgcgtgtgcagtcagatacacccgcaatcatcatccgcgcaacggaaatcggatctttgtttatcagcccctacgaatcgcggagaacttaccagtcctcgtcgacgtcgactttctcgcagagaatgatgacccgatggcagtgagtgcgagagtcacttgtgatctattcttgagttcatacgcgctgtttgaacggtttccggataccatgaggtctctcaagggtgctttgatgcgcaaatggcatgatcttacagatgaacctgatttgacatgtttgatcccgttacttcatggatatggcccctttgatacgaaaacaattcaccgtcttcagatcgagcttacgacgaagaagccttcatcctcgtcaagcccacattggctcaccagctgaaagccacagcggcggtagctcagctacctccgagtttaaaaatgacgaggaagtagaagactatggtgtggtaagctttctgccaattgaagaaaagaaaaactctggtctctacaacatgaatatgctgtgtccacctttccccgtgcttctccagggtatcaacaagatttcgagtttcggccagtctcaaaaaaaatactaccccctcatcatttacctcgaattctcaaggctcgttcgaggaaattcgcgtaagagcggctggatcagagtctggatggtcacgcgtctttgccaagaagggaaaatacatcaatgatgaactcatcgcattccatacgattggtaagactgtggcgatgaccaaattcgaatacgtgctgcttcccatcttcgacctggtcaatcaatatgacacatagaaggccaatctctcagtggacgttctgagttccgctctattcacttgtgcgccgttgactagatatttccgagaaagggcggatatattcttcctgaacctcgccatcggggtccgactggcgaccgagctgaatgaagtattgtccgaaaccttcgggtgggctggaatttaatgctgggaggaacccagacatctctgttggttcgaccgaaggcatgcagctacagctattgccactaccagaagaaaacaaatatttgtcttcacagttgacggtagatctgaacatagatttcttcgccttcttgttctcttcaaacctccgaccggacgatgtctttttgaagaaaagccgatgaaacgtatcagcttcaacagcggttttcgcacacggggaagagtcacaggggacaattattcgtcggatttcggcggccaggcgggctggtatggtggtattgaaacccccctccccccaagacttctgatccaatttgatatgattagtctgatttattgactttggttagatttccccccacgcatgcattcgggaaagcatctttgccgagccacggatcgatcaccacttcgcatacgcaggcatcttgaccgagttcgaactggatacatctagattatcggtcgatgtgggatgctgcatgggcactgacatccggaaactggattgatgggctgtgtggttagctttattcttacaatcttctgttcaatgcccgacacaattgcgtcaattagatatagacccttctgatcgaatgtaccagggtcaatatgctatacagctggtgtggggtcgatgtcactttatttttggattttctttattttcgttttcggcataatgtacttttgacattctacatatactacaacacatattacagtgggcacagctggaatcctcaagtagtagccttgtctcttaggcagagagaaagtttaggggccttcatgtgaactagaatcccagagcaggacttggaccagtcaccacagaatgaaaaaggagtttacaggatgctcttgcattagaggataaggatgtctactacggtttgtataatctccataatagctgacctctctggatggttggtgttattgtgtcgctctcgtcttgtctgttatgccatactgcctaccgtgcatatccctcttcaatatatatatactgtcttggttcagcgtcccaggtcagtggtcactttatacacaccaaagtatgaggtgagttaaccaatcgtcattcactggctcagcacattcctcacaaccatcttcaagtccaaagcagggacactcaggagtttatttccagatggatcgtcgggagcgaccacaatatgtcccatcagcctggaataggtgcacggccaataatttcaagaaacagtaatgatagccccgagcaaacttctcacgaccttgcgcgagtacgtcttatgtgttggcacgggtgattctccatttagacccgctttccacttccagtatttccaagatgtcgttctgcgttgtagtcaccgaactgatgcaaaaaaacttgttggccattgcggggggcaaggtgcagcgcacgccctgttgtaccgacgatagcgttcagaagttggttgcggataagggctcgtttcccgaatcgtaaatcacggcggatttggcggcaaggttgaagccgggggcgccggggtttttgagcaagacctggaattgctgcgtacccaaggcctttgaccatctcaaccccgagaaaaccccgagactgcctcctacctgtggataattgtcgctagaacctatttagttaaatatgtgctagcatcgtggttcatggtctgtctccacgcaccccaattacgacgaccttcttgatgggatctatgctgctatagagagagttgtagtgagaaaaatttctcgtatcggatgagtcaacaattgaaaattcaggggttgcccttcaatttcaaacaagtctaacgcgggtgataaaagacttggcgcttttaaatccgagtgacgtcatatgtaagcatactagtagggacatgcatgagcttaattcgacccctggcggcttccaacgtggttatttgtggaccatcgagatcatgaattacgtttacctcccgatacggtcccttttgtcatggagtaagggatgaaatctcttcacggatatattcctacataaggccgtgatgacaacccacttcatggtggaacctttatcagtagccaacccgatgtccacaaagcatcacaaatcgagttttgtgagaactttctgaaaccgggccgattatgacggcataggtattcttcacggacataatcctaaggccgtgatgacaatccacttcatgttaagtggaaccttttcttcagtattagtcaacccgatgtccacaaatcatcacaaatcgggttttgcgagaactttctgaaaccgggccgatcatggtggtgtaactataaaggggatttaggctgaaggcctggggaccctggtagaatcattcaattcaatatccattctcgatttcatcaaaatgaccgattacaagtttgaaggctggtgtggcctcggccctgaggctggcaagggcaagatggtctggcaggagttcgagcctaagccctgggaggagacagacgtggacatcaaggtcacacactgtggtatttgcggttcggacctgcacactctccgcagcggatgggtatgttttctttcagttgctctgttgactcggtttctcttttctttgaattacttcgttgtctcagtttctcgggtgaattgaaggctaacgtctcttgtgtatcgtacaggggccgaccaaatatccctgctgtgtgggacacgaggttgttggcacagccgtgcgtgtaggtacgcaggttaagaacggcattaaagtcggggaccgtgtaggtgtgggagctcaaagcggagcttgtgggaataaggacggcgactgtgaagcctgcgcggcttcactcgagcagttctgtaataagatggtcggcacatacaatggagtgtacgcaaatggaggaaagtcttacgggggttatgccacttacaaccgctcgtcctcccacttcgttatcaagatccccgacgctatttcctcagcggacgctgcccccatgttgtgcggtggtatcacgacgtattctcccttgaagcagaacggctgtgggcccgggaagactgttggtgttgtcggtattggtggcctaggtcactttgccattctattcgccaaggcccttggtgctgaccgcgttgttgctatctcccgcaagtcggacaagaaggcggacgccctcaagcttggggctgatgactttatcgctactagtgaggaagaagattgggtcacccgtcacggacagtctctcgacctaatcatctcgactgcctcttcttccaagatgcccattaccggatactgcagcctgctgcgtttccgtggtaccttcattcagcttggcgccccagaggatggtggtcttgaaatccctttctttgctttgatcggcaagggtatcaagcttggtggttcgctcattggtagccctgatgagatccgcgagatgctggaccttgctgctgctaagggtgtcaagccctggatccaggaacgccctatgaaagatgccaaccaggccattgtggacatggacaacggtgatgctcggtaccgttatgttttggtcaacaacctgtgaatcagcttactaggaccgatgtcatggatatgagctgaaatgatgttgtaactagcggtttgacgtttactacataatagaggtatatgagagtttagatcgtgaggcgtatttgggctgctggggtctttgtccctgcaatttaattttctctgattcatggtgatatttgactcgaatgataggaataatccgagttagcaaggcttgaatcacttggacgagttgtcatgacttacctgcttagaagctccgcaacgttgactcaccgaaaagcgcatacaatatcgtcgctaggaaatatgaatttttttttcccctggcctcgatttagtattgtctagactgcggaaagtgaggtcagggtcgggcgaccgccgacgaatcacctctcctgttttccctccagctggttgatccgatgactatatctggacccactctgctgaataaggttggaatcgagtcgagggcttagttacattgatcgaagggcttaagccttacatacagctgatcgaatgttagaatgggaccgctaatttagcgtgaaggaaaatatattaatccgtattaatccgcgtttcgaccatctatctgctcagaggggtcttagtgaatgtcgagatctctctttactctaggatgtcttcatagcttataataggcgttcataaagaccgcgtgatcattatttacagtattatctttaccactaaatcctatcttcttctatactaaggtattataacccctaaaaaatcccgacattcgctgatgtctaacgttcactgagctctcggaactcggattaatacgtgttcctctgttccaaaaggcgctaaaaattagctgtcccatctcaacattcgctcagctgacagatgaagggatgctttgtcagcatatgatggatgacaaagctacccacctgacctcgggcaggacctgcctgcccaggtgccctaccctgtccaggaaggtaaaagcgaggagtcgcatcaaatatatatgttgtagtgtttggcgaaaattgttatgataatatgaacgactaagtggaataagctcgattttagggtgggttttaatgcccggggctacgactaacttgaaacttgctaactaaattgtccgatagaataaccatccattcctattgcgctgaacctttccttaatcttttcaccgaaatgtcaaatcagatatcaaatcagatgtcaaatcaaaagacccttctggaagattttaatatcggaaatttcgataaacaagcgctcaacaaatcagtggaggcaaaaaccggcgggtcagtcgtactcgacgaaaaccaagccactataacggatttgcagagcgtttcctggcctgtcgcttccgctcttctggtcaaagaaaacggatcaggcggtagaattcaaattcatgagcaatcaggagagtgcgtgttggtggtgatgacgggccctcaatttgacgaacacttcgccatcgcttggctaaagaaaggccaaaactttcgtttttacgggaaaccatcagtctggtttttcagaccagccagcttatagcgcacaagctgttcgcagaatttcaaggacacatcgatttgaaagtgacctccacgctaggcccgccataccaaggacaaatcatcttcacagcaggaggaatggctgcttcgcggagaataggagctatggagcgcattccatggtccacagtttggccaagtgtgtttttctcaatagccggttcgcaggaatagaggatctctaggaattcgttccgctcaattgaaacagttgactgaatcggttgatccgaaggtagaccgaagctgtattcttctatatactattagttttagctcatgtttaccacttcttgaactgaccgatagttggactcaattgaacacccttgtgatgcgactcggtaataccttgtaaagctactggtcctccaacgtcaagagcagaagcagaagtgtcttgtttgtaatatctgagtctgaagtgttggcataaagccaacgcaactctgcccggggttctggnnnnnnnnnnnnnnnnnnnnnnnnnnnnnnnnnnnnnnnnnnnnnnnnnnnnnnnnnnnnnnnnnnnnnnnnnnnnnnnnnnnnnnnnnnnnnnnnnnnnnnnnnnnnnnnnagccaacgcaactctgccagggtttctggtttctcttgaccggcccaccattccatggttttaccgatccatttaagttgaaagtcggataatttcgtcttgggaaattcgagcagtgacaatactaaaagatcggacgggaatattttcatcatttctcgaatattgccccgcgatttttcatcccttcgtatagaagtacgagttagcttgtcctctcttcactcgagctacccaacgaccttgtgtgacgacttcccagaagttcgtcagtcattgaatcaccattcttatgaagaagggcacaatccttgccagcagactgcataatttcaacacagcgagaagatagaatatacgaccgagccaacatgatgcttgtgaaatatgtgggtcgcaactcctgtgatgcaagcgtgacattgcatactggttattcaatcaatttgtagacagaaggccgcgggaacccaagaaattggagataatcaataggcttccattgttggcagcagtcggggctatccgtagttttaatatgcaaggacgaccgtaggacgagcgggaacttttttccacctgtcaaggcgacgttctcggggggatggtggaagaaatcaggaacgtgctttagcagacctagaattgcctgcaaatgcatgtctagggacttcgatgttccatcatacctggatgctgcttggctccaggggtgtagactggcttggtgacatgcctggaagtgatcctcaggcggacaaacaccgtcaccagggtaccaattttcaacatcgctggttgaagaatcggatacggagctcgactgctcgtcatagtcttggatgaggtggccgtgttggttctgctggctttcctggctgtgcgattctagtgcttccatttccctttctcgatgagagacttgacgaagagacaaggatcattggggagatttgtagggtgtagaaggggcatagaggcggtgaggtagagactccaggcaggggctgccgctgcctattttcagccccggctcaaaccatcaaatacccattatccaatgtgccactgtaaagtaacggaagtatgtgggttgagattgaaaattttgcctaggagatcagctggctgctatcaacatgttactcataaactattcaaaatgtctttgtaagtaattcacaatttatgtacccaaggaacgctgctagatcccgacaataatatctagcagtttttgaactccgaattcgaaatatctgccacctggtcccttgaaatggatctgacattcacatggtggacatccattggctgttggcagcaataccggctcggagagaagatgacatcgcaacacctgatcgaattgggtaattttactaaattatagggctagtgagaaatgtcactcaaatggcgctatacccgaagcagtttagaggatttaggggcaaacaaattctgcctcaggccataaacctattgcctgaggcagacaggtcttctttgacccgtgagccgttaggtcggtgcaaccttcttgtgtattgacttttgaatgaaccatggaagcatcgaaggggaaaatgacgactgcatagcatttccaacgaagaaaaaaaatggaaaaccggaaaccgagtttatctgcaccgataaactctatgaggtcatctagccgtaggtccaaccaccgggcaaattcaattggttcagtactataatttagattgatatttcatgtctagctaggaatatgctgtgctttatattgccatatcttttgcatagcatatcggtataagatgaaataagaccaaataataccaaatgagatcaaataagggttgcagacaacgtggtccccactggacacggggcacagtggacgatctctatcttaaaagtgaccagatggatccctccaaccctggaagtgacccacaacgctcagactttctttgatgaggattcctattccggttagacaagtatggctgtgtttcccgtcagatagcgagcttgaatctactttctcttgactccctgtcttgcgcttctctcttcttctcctcgttctgatcaatgacccttttgaatatgaatgggtgaacttcctatacccatgcgcccctttcgttagaccataaaccctaatcatcacgacgaggtaccccgccaccggatattaatcctaggggcggtatgatcggatcgagctgccagcttgcgattatcacgaacaaacttcatgcatactcaagcaacgattattgagagaatttccgcgttcaggatgccacatatgatgacaacattcaattcgcgcgcaggccgagtcgcggtgctcgcagtcttctttatcctcgcccttatctggctcttgcccagccatgatgcccccttagtgtcgccaatcttctacgccggggatggatacaatagcagtcaccccatcgatgctctgatcgataccgcaaagaccgatctccacgaactcctcggaacacaagcgcacgaccttcaaactgccgcagaccaatatcgagcgcggcgtgggagacatccgcctcctggttttggagaatggtaccagtttgcaaagtctaaggattcattgattattgaagaattcttcgatcagatctatcacgacctgactccgtactgggctctcgacccgaaggaattgcgtcgacaagctagaagcatcccgacccgtatcactatccgcaacaaaaccgcgatattgaaaaccgatgagccgagaaattggatggactcgtggtatgatctggtcgcgaaattggaggacggactccccgatctcgatatgccaatcaatgtcatggatgaaactcggctcgttgtgccctgggaggaaatcaatgagtacattcagaaggagcaggcaaatcgcgtgatgacgaaaccgagccgtgttatccccgaatacatgtctttgaccgattgggataacgaagacctggaaccttatgatcctggatttgcaattccgggcgagggaggttactgggagatggctcgggttggctgcccacctggaagccctgcacgcaccagcaccctggccaaggttgatttcagtactcctccttgggaatacgacaatttcgagagaatgtcataccacggttatgtatcaaacttcacattgacaaaggacccatgcgtgcgcccagagatgcaggtattgcatggaaccttccttgagcccatctctgtttcaacttcgcacaagctgatgccattgttcggcgggtccaagcttcccatgaacaatgagattcttcttcccccggcgatgtactgggcccagaacgaccattattccggcggggagaaggagcacggtggcccttgggcatcgaaaatgaataaggctatgtggcgaggtgctgctactggcggccgggctcgagagcccaactggacgggcttccagcgacaccgattcatgtcgatgatgaacgcgacatcagtggctcaggccgagaagaaccaaagccacggcatcaacttcagactcccaaactatgccgattacaagttgaagggcgacgggttcatcccgcagcttctctcggagcatactgacacaggcttcaaccacctggtttgcacgccttataatgaatcggacccgacgtgcccgtatcttgatccatatttcgaggtcgcgcctggaatggcaatgaaggatatgtacaacttcaagtatctgcccgatcttgacgggaactccttcagtggacggtaccgcggattcatgttgtccacttccctccctatcaaagctactatctacaaagagtggcacgactcgcgactgattccgtgggtacacttcgtccccatggataccacttaccttgacatttatggaattatggcatatttcctcggcggccgtgacaaggttgcccgtaaaattgcgctcgctgggaaagcttggggcgagaaggtcctgcgccgggaggacatggagatatatacataccgacttctcttggagtatgcgcgcatttgcgatgatcagagggaattcctcggttatgtcggtgatctcaagatgtgattgcttgttcatacgcatacgtacaaatcgactctcgcggtcaactccccaatcctccccagcagagtcggtttatcgggcatgattatcggactttttttcataatcgaaaaagatcgttccgcctgaatccttatgtggcgccctagcctaggcatcccgactcctcgggctttctcggctccatcctcatggcactggccttgatgtctccatcccggcgttattggctttctcagccttcggtctttctctcactcccttcttattctttaatatatactaccttcatgtgatgtttgtttttacttgtcgatgattactgataccatgtcaatattcatttctcggccagtgcctgatgtacatgaaacctgacgacgatgtacataaataggtgatgtttgtcatttatgattttttatttgcttcttacattcctctttgcacacagataattcttacattagaaaagcactatactcgaactataacacgtcttactccttccactcatctctgccgagcctaacaatatcagcctgttccagagtccaatagctcgacggggctttgccctcttcaaccaaacgagcagctgctacagctgctctaccaatagtagtttgatcttgacctgctcgcgccagttagctctgaatcttcgtcaacattcgcgtgatcagcatagccataccaactttgtcttggataccctgaccaagcttctgaaggccttccacaaacttctctagaagaaaagacttcgacttctccctcccaataatcatcccgggtctcagaacgatagcattctcaaagttaaactccatgatggcatcctcgacgccaaccttcattttcgagtatgggacccagccccagagaaggcttcttgtgcctccgctggaaatgaaaacgtacgtcttcacgcccgcctccttagctgctcgagcgttctccacgcataaatcatggtcgatcttccactggttctggatgctgcctgctgttgctttggtagttccgaccgcgttaaagaccactgatggcttgggggacagagaagagatcatgtctccccattttgaggtatcgctttcctcgagtgcttcgagcttatcggcctgcgcattcgggagtcttctggagatggtcttcactttggaaaatgcgtccgatgagagaagggtagccagaatctgagaccctacggctcctgtacagccgaataccgctgccgtcgccatagtgtgaggtttgtgatatggcactatcttgagagagacacgttccaagataagatgatgtggtccgagcgtttgtatgtccccgcctaggccaatctgacagatgacgtcagcatcactatacacaccattgtagacgcatcttactctatcaatctttctataaaggaattaccaaatctattttgcacactaaaggaagtgcggagatgaagatattattattacacgaaagaccacaacacccaataggacacggtctacaacatactcaatcgggcgccctatgcgggattttccgccaaagtcgcgccctgctacatggcttgatttcagactaaccaagtacataaacaccaaaatgaccaggtaggattcacggattatgaatgaacattgatcgtcttggacatctctccagcccaaaatgaacgaccttaatttccgtgtcgcgaccgaagcggacgcgcctcgactccagcagttggtggaatctgcgttccgcgccgaggacagcagaaaaggctggaccgatgatctaggcctctcggcaagctttcgcctggatgtccaagagatcttggccatgatcaccaagccggacagtgtctttttgatggccaccgacgatgaaaatacgctcgtcggctcaatcgggacttccaaacgcgacataaaccacgctcatctttttatgcttgccgtcgatacaagccaacagcgcggtggcgttgggagacaggtcttggcttacgctgaagactattcccagaggacttggggtgttaccacgctgggattaaatgccctttcgaatcgccagcaacttatctcgtggtattcgcgtcgtggatacaaagaaacgggcgagacatcgccctttcctcgtgagaagttcgcgaacttggcgttaccggatgatctttgttttgttgaatttgagaaggttctggaatagcacctaccggacaagcgcacgtcctaaaccggggctagcaagtccggtggatcgaggataggtgggattgaacggctcagagaagatcgagaaatgtgaactaagtgaactttcgaataagattcagaaatgaactttagcagcaaaatggtcataagataaacctaaaattttaggaattcaaaatatccgtccaagtacatacatagccagcgcttcctagattttattcgccgaggctagtacgaacgtagacaagcttgcatattgtgttaccctaggatcctggccttaaatctccttgcctatcttaagcccgaaatgttttctacatgacttcagacaaaaatacattactagactaggcattctacataccaagccctcaactagaattatttgagcttaaacctaactgcaaacaaggctcaaatgggccatcattccttaagtcatgtcatgagaccaagaccttacttacaatctagcatcaattaatcttgtcgaacactgaggtggatacatggcgaaatagaggatgaacccaggccaaaagcctgctcaacgggatgaccaaccccatagaaaggttcatattgttattactcaaagtcgtcagtccgattatttcctagtttgtagagaattgcatatctgctgaattacatcatcttttgcgtactgtatattgctgtcaaatcttaatatgacgaatgatagaagatcactcgcgtgcagtactgtcacactatcaaggcaacaaacaacaagtcatattgtcgttggctatctcctctttgtttttccgctcgactggacagaagatcaatttcaatttttgcgtacgtttaagtgaattcaacgtcatgtagctacatgtactaatgttgtgtaacccaccctgccaaatgccccattagagtctcaagcctacatttgtttataagttggataactgctctgatatcaaaaggcacgaaaagacacaaggacaactcccacattccaatacaagtctacccatttatcaacattatgaatccaacatcccaatcggctgtgtcatcatgtccaaaaatcctaatgctacatggtaacataccgctagtttctacaaaatatcatatagagctttgaagtatgaatctgactcattcacctcttctcataggctacgcccagtccggacatgtgctccaatgcaagaccagattcctgaagcctcaagtaagagatgctgttctcaacgctctgcagcaagatgcaaattcaaagcccgttgacgtggtcgagtttcactatccttcaggcacgtggcctatgaaactcgatcaaccccgggagagcaatgagctgtggacatggggacatggcgaatctatgactggccgtatccggggccttgaacagtctgtcgatgatatcttccgctatcttgagaagaatggcccattcctcggggtcatggggttctcctcgggtgctgcagcgggtgctataattgcttctcttttggagaaaagacactccatcggcaatttccaatttaatgtaagctgggggaaatatagttggcctggaacatgcccaggtggtagcatggctgactttctttcccttagacggaccacccccctttgaagtttgtggttgcggtttgtgggtttgcattgaaagatcctctttacaacgacttttacagtcccaaaattgagacgccgatattccttgctattgctagcctggacgtaatagtcgatgaatctgaatcgctgagactgcgtgattcaagcacaaatacagctttgtgctttttcgagggggcacattatgtcccacgagacaaggtatttttgaaatccttggtccagtttattgaagatgctttgagcatcaaagaggaccacgaggaggattgggaggattgtggagataattgcggattgcagtaggccatgacgtgcaactggacaactattggaaggcaccactcgggctcaaacaggcaggaaggtactgccaaggcaagagccctgaggaaggaacgataaaaaagtgagtatagatggaaagcttaaggcagatattgtaacccccaaccccgcgttgaaaaactgtgagttacgggctgacggcagggagcctaccctaaaaagttggctctctgatgtctcatacactgagcgaggcgcgtcttatgccaatgaggaaactatccctaggctagctgttgtgaagaacctctggggcccttttgttttctttcctccttttccatgcatgttacaagttgatcacgtgatgccaccagcccattgtttttcgggcgaaaaacgtttgtcttgtttgttttgttctgcctactcagctatgtccacaagattgtgttttttggactattgtcattttagagagttagagagattattgagattattctgccacgtatacactcgccttaccaccgtttttccgtcattctttcctcctaagggatcatttgaagctattcacatttgacccaccacaatccccaccataaccccacccccacgatgtcaaataactagacctccagtttactctttctcacgtattgattcctgtatgtggtcgggtatacatacctctctagatgaagttatgccaagcttcggtacaaccgtggatacgcctccccggaaccaactttttagctttgacgaagtctttcacagccttggaattatagaatcaattgatcttatcatatacagatttaattaaagagtgccataactgaatccacttctgggcttgaaatatttcaagggcagttgagtctgctgcatatggtcaactggctacttagttgccttctccaaatccgcagcccagagagctgcgccaacagtattcgtgaatgaaaatgcgatcgaggcaaatggtaccatttccaaaacaaaggccgcaattccaagtctgatgagcagtcagcattcgaatggatggtaggaagaaagatggagtttacgcacccagtgtatgcgccctggtttttcttcacccattcctctcgcattgtagaatcccaacccttgagctgaaaatacctggcatgaagtatcggtcctgctcttttcccttgtatgaagatatacaacactgttccgaccacaggaatgaggttcaggggcaggtagagcaatgatcgcagcagcgcccgggggttcagccgcgcgagaggccgcgtgaaaatcttacccagtctagccatcgcatctctccctcccgaacggggtttcatctggcgtccttgtgctacaagtggctcctggtcacgcgcgactagggtgccatcgaacgtgtcgatcagggcatcttcgatgagaaatgaacgcgagaggacgcttgttatggcggaactttcgccgagaacgagaatcgctgcggaaatagcagcgagcgggccactggtgaaggccatgatggccatctgcggcacgtacgtgaagaagaacatgacggtcgtgacgcctactcccagtgtgatagtccggccagcgcgagatataaaagggcgccagaggtctttgtgggctgcaaagtagacaattccctgagaagatatttattgcaattagagatggtcgggaagcgcccctttaagagctgacaggcatagttacttaccttgaatggatacaagtaggcgccagacgtgatcacgtcatgggcaattgcttgactgctcttgacctcggcaagcactgcatctttgatcttctcggacatctttcctatagaattagtattagtatcggatgagaagaatgagttttgggaatcgtgggagatgacgattagattatcgataagaaaacagccttataatgacgtcattggattgagcttccaaggttgtgcgggacggagtgtactatgacaggtatttataataaatcacatttctacggtgtggcaagcttagttatatatctcagcaagaagtgatctggataggaacatggctgagattagttctcactgaaaggagtccatcctgcagccaccatatcgaccgccctctgagtcgcttcatccaagtcctccttaggtaacctcagtgtatcatttgccaactccattatccctgcaaaatcaccttccttgttggctggcgaaaatacaccaccataaagcatcttagcgaaccccgtgaaaattcccttagacaactcgtcggcgccgtctgcaagacgcttagcgacactctcatgagtaatctcccaatcagagtctgtagtgcccaagacacgatgcagactgtcgagtatatcgcgttgcgacacgcggaagctattgatccggacttccttgttcttgaagtcgacaagcgcaggggttgatcctgactccggtaggctgaggagggcagctagagcgcgaccacattggtcccaagtgctgatactaatgatgcgagtaccctcgtcgaaaaacgtgacctttcggtctttgatcgtgaagccgaaccattgctcgccgcttgccaggctccattcgtaccagaacccgcatgataatgtcactgaggacgagacaccattttgagcatcactgattcgttcaagaacgctctttccatatgcatccccatctttcactccctcagggctaagagggaatccgtacgcatttggcatgatgtaaggaacaccagcctttccggcagctgcggtaatcctagcgtgaagatcctcgggggctcggacgctcagggtaatgacaaggaattgttggccattcaaggcattgacaagcgagtcctcatcgtcgtacttgactcgaacggctcggactccattagggagttttgactggctgtcttcgcgggtgagagctgtgactgtatgctgccctgtttgcagaagcgactgagcaaaggctccgccgatgcggccagtggcctgatgattgtcagcaatttctcctcgaagtgggaccggcaaaatgtagggcataaggcaatagacctactccgacaatggcaactcttgtgatatgtttcttggacatgttgaaagaaattgttagaacaatggtctgaattcttgtctgacaggttgcgtaaacctcgtttatatatatatatatatccatgacctgcacggagttatcggactaaggaaccgccgcctggagatagtcggagaatggacataaggactagtaaagccgagcctgacttggtttgtgctgtccctgatcgtatttcgcttgatatgacgagtgtatacaatgagatccgtaagccaaactacagtccacttactccgtcagcccagcccaaaacctccgaataaaaatagcctgtgtcaaagaaagaatgacaaattgagcttacgcgtaaaaagagtgatatgttgcagcatttatccccagtcaataattaagctgcttcttttatactgccgcaatggccgtgagagttttgcctgatggtaagggcccacactaattgaagaggtaagtctgaatccatgtttaagtcacgttaattcccacttacccatccatagttatcgcaccggcattgctcgtagagagggcaactaaaaacgaaaacatagtcgttagtatcccatagtaagcaatgactgtctctcagaagacacttactgaatcccctccataccgaacaccacatgccacaaagtttcaaacacccacccgacaccgtagtcatcaacaagcggcacactcttttcattcacccagtttagcatacggatataatcacttttgggtcgctgccagatgcgtgctcggctgaccgcaaactgagcacagcagatacccccaatgtgttccggaacttgcgcatcttccccaaatatgtctttatatatagttggaaaatttgcacgcgcatcattcttgtcaatgtctgcttgcgtgggattgttgggattgacatgagtcggacagcctgggttattcgtacagcgcaggttcaaatatcccatcgcatccacggcttcgcggcgcaggctatgcaaaacgctgcttgtgtgggggccaaacagatcgttgtgccactgttcggggttggcatggaggaaaatcgagtactcgggaagctcgtcgtataggtcgacaatgaacgaaagataggccgaggcttcccggccgcgagaagagtgtgcgacgagtagttctgtctcgggctttttgtccatagtgtaaataaacggagtgttatcgatactggccatgggcattcaattagtgtggtcttttataaccttgggacttgtttgcttactgtgtttgaagataatcacgaagccatctcaagtcatctgagcgtgtctttgacattaccaaagcgacctttgtggtggttgcattgtagctttgggttttcttaaccagttcatgtaacgctgcagtcctttctgcctcttctgattgttctactggcatcagcatagagccacaccgaatttcacagtgcagtcgcgtacttgtgtctagggcttcatccacagtttggactgagcgataagcatccaaatcacagaacttcagaatcaggaggactgtgcagccaaatatcatgagtcctgataatatgggctgatgtctgatccatgagattatcgatctcttgagtcgtgctggatatacacgactctcagacctgctgtgactgaaagtgtcgctcttcattctgaatttgatatgccgtcaagaattaaagtgggagaaagagaaattattttggttctgggtgtgcgacctggcttcagaccgtagttttcgcggccgggtttgcaacatgtgtgaggctatgaccccccttacgtgggaaggttgtgctatctcaatccatcgaacttactcaggaggtggacgtaagcaatgcctagatctctctgctttataaaggtagattcccacagagtatgcaaagagtaagatatgacgacacaaactggttgtgatgatgtaggccatgtatgatgtgccatgtatgaacttgatatcttattggtcgcaatcacttcatacatggctcgcccttgcgtggtaggtggtcccttgcctttgctgtcgatatctcttaccgaacaattcatgtacccagcaaaagattttcgacccatttttgtagatgccgtggtccctcttgaaaaagctaggctcggtacatgtatgttgttgaagaggaatggggcggtatgtgcctgatgttggtaaatgtcgaaacattcgtaatcccatcccatctgatgtgaagttcacgcggagtatgtactaaatatcgctgacactcaaggcaactgtcataaaacaacatccaacggatgtctctgggttacaaactaagcaaacacgctgattatgtgcataactttgctgactttttatctttatgaacgccaagacctggcttatgcaaaaactgggtccaaccaaatcgggcttgattttctatctggtactgttactaacttactccaccgtccgctatgaatacttctatatccaagccggccgtatcgcctacaggcccctctggcacttttatggtcgagttgctgatctacaacgggtcgcctttcaaaaatcactgggcgtactttgttcggtcgcacgaagaccctgatatcggcgtgaagatacacgcgaccggcaatgtgagaagtggcttcgagtttgaaattaagcgcagtgaaaacctgcaaatcaccgacgacattccgtcgacaagggtcccgctgcaatgggtggacgcagattactttgatgagaaggcgatgcttaacgatggagaatacaaaatcgacaatgcacctgtctgtctctttgagaagagtgcttacgaggtcaaagctccaggaaagactctgaactcaatcagtgacggggtgagtgcatccccaacccagcgcctagactgcatgagggtgtcttctctttctctttgagcacacacttacgataatccacacattgctctttttctaattcaccaggattggctgatttggatgtcctagcccaaaccaggtaggaaagttattcaaagggattgccagacatggattgtcgagtctgcggatcaacttcaccgtgacaacattttgagcattgaggttgtcacttatcttcacgcaattaaacagtgatgatgggttccaccagtcgttgagccgggtatcttttcaaagacactcgcctcggtacatgcgaccactttcggttaatgtgagcttgctggcccggctgattactagggaggcggaagcttctacaagaagaatcattgctcttttggaaagtaattcattttcagccaaatcattttacactggagacgaagtggctttcttcagtggcttcgagcagttctagctcagtaatatttttgaattcatagccgcccttacgcaaaaaaagaagcttgaaaccgggcagtattcgttccaaggtgctctcatttcgacgtcaggttcatggtaaatggggtatcatacaggagaacatatcacaggatttaatccccaacaaaaagcaaatcatgaccacaaaatattgagtttcgcaagaccgcgctttggcttcggcatcggctccggatttttgtgccagctttcgatgaaaggccgaattggaatttccgccagcgggatgatcttcgtctttgcccagaatttgtaggcaaaatacacaataacgatgaacggcaggttgaaataagtcgaaacaaaggttgcagtattccaatggccccgcataaatgtcgaaaaccctccagtgaagaacaaaataatgtatatgatcaaggagatccatgttatgtatggctgaaaaggtgctgcccacgggagctccttgaagcgatcgattccctgcttcttgcatccgtagtagaatctaagataaacaatgcagatgcacatcaagttcactagagtagagatcgagacaagattctgcagccatgtgaataccgtactggccgaactggaaagactcatatatccgagtgccatgaaaacgccatagagtgagactgcaacccaagggataccaaatcggttgatacgcttgaagacagcaggggcgtggccctgggtcgccatgccgtataggattctggaaccacccaagatattgctgtttccggaggaccatgctgacgtgagaacaactgcgttgataatcgagggaacgaccttgataccagcatggcgagctgcgataacaaaaggggactgcgaggctgtcccggacgagcccagaagattcggatcggcagatgaaacaaccagaccaaccatgaagattgtcaccacgtagaagagcaaaattcggatgaagatacgtctggcggccataggaatagcttgacgaggatttcgcgtctcggctgcagcgagggtgaagttttcgataccagagtaagcgaagagagcgttgtcgaatgttttccagaatcctaaaaatcggccgagggacccacccactcccaggtactggatgaaggggccatagggggctttccagtaggcaaatccgatggacgtcttatccgggcctcctccacaggtaatcacctgtcaagatggattagcactcaaagtaaacacattcccagcctgaagagcgtaatcaccaaagccatgatgttgatgcctatgatgagcataattttgaggatcgaaaagccaaactcgagctctccgtacacgcgaacaaagacaaacgcggtcgaaagcatgagggcaccaagcacagtaatccatattgcgttattgacagtgatccagaactcgataataacagccgcagcgacaatttccgacggaatcgacacagtgtaggagtatacttggttccatccgttggcgaacgcgagcgcggggtcacagaagacctctgcgtatcgaataacaccgccattgagaggtgctagggctcccatttcaccaacgccgaagacgacactcgcaaccgtagcgccaataattgtgtacgccaagaacgcacccagtggtccagcttccacaatggcacggcccgaactgaggaaaatacccgtccccaccgtgccggcgagggcaatcatctgaatgtgtcgctcatgaagaccctgtctgaactggtgaatctccttgagctggcctgcagcattttctatatcgccagtttctttcatttccccgtcttcgtagtgaggaactttcgggttagacgcaattggggtgttaatgccatggtcgtccttcagaacgtggttcgtcttatagtgtgacattggaaaccccgtggcgtgtcacaaaatctttgcagaagagaagacatcagctaatgaatagcaagttaatagcgctcgtacttttgcacataactaattcttgcaattgcgcacattgtggctccgggcatggtcagttgaaaaataacagctacttggaaaaggccaatttccaatacatatcgtgttgttggctaaggaccgaatttcccctttacaacgcggctttcgcgtaaaatgaaaaaagaaagaagtaaaactcttttcagcggggtttgaatagggcatgtatttactccgtgggtactcatctgctgcccagatgtggagcggagtgggtcacgcgacctgcaatcacgtgcttagtctttctcctgaagaattaaagagaacgtgtgtgggttgttagtgtggcagtcaagttaatgggctagacatgtattttatatctcatttcagcggtctagcatggtcatgtcaagcatcagtgatgcaggaacagcacttggaatattgcggttagggcaccggcaacaagttaattaatctagcttttagtattacatacaacatactgtaaccaggcattaactaacctagcattcaagtggcaaggtggacacaagctatacggaatccataatttcaagtaagcccactctcgagcctccaggccaggagcttgggcgatagatgctactttggtgtccccgtttactttctcttcgtcccatcacagatccacagacccttcgtcttccgatgttagctgctgaaagtgtgtttggaagtgacgacgctttagagcgcccggtcgtaatcgattggttgacccttgatgctgtgtatgtgcctgttgccttgcttcggcgcttaagagaaaatcaaaaagctgctttgacgtaataagaacttcacggtcgagatccacatggcctggtgtgagctcatccgtcgcgaagtccctgaggaatagtcgtagcgcagttgccgcggttgggaatccagagtccgtccggaaggcctactcgacggtcaacgtccgatcatcggttgtatgtcttttttgttcttttctttttccgcactagagaggagtgtacctgtgcttctataacggtagccgcacgaaactcctccacgccatctaccgttgtatactccggtcgccacatagtaacagttgctctcttagatcctttataatcaatatcgaaggcaagtaccgcattcacactcccattagtgtttaagatatactcatccgccaagtggggaacctgccggcttttttgtgcatagcacacctccacaattacaccgagatagtgtgcttggcggtgcccaaacgaggcatctggttcccgtcttgaataagtctgttcgccattatgtgtatcttcgggtattaaaattcgagatgtggcaagatactcgacttcctgagcgaaatcggagagaggtccgttgccctgttggtattgcctcaactgtcttgatatttcgtcggctactcttgcgcaaaacgtatcatggagaggacttgacattcggattgtcaagcagcagcgacaggggtcgtaatcgtatctatgattattccacttgagcacatccggcctttggctcttgatgtcaaaaagctagtagtactaaccttactttatcttccacgtagtttcgaagggattcatctgcatccagcgcacgtaaaacttgtgcatagtcgtcaggtcttagtcgacgttgccaccaggatcctagccggtggcctgcacgatggagtcgtaaacaatccatcacgctttgggcgcttctcgacaatggcttctctgctctaggtggcgacataagaggttcaaaaacactccctggtggactgatgtcagctaccatgagagatacagatactagtatcagaatgtagtttgttatgagatgggttagccacgcgtgggtgtcaaaacatgagcgtgtgacctagcaggcggtgtgtttattaaagatggaagtcacatcgtctcccagtacgctgtcaatatcagtaagcagtaaaagggatgtggaacatgttccaatgacttcctgttgagttcatttatttgacatgaattggatatacaaagatttccgagtgcaactactcaatgaaacctgtgtctaataattaaccgaaatatgaccaagtagatcgttcaacctgagtctcctcatttcaaactgatggcatcaagaccatcatattgaatgccaaagccctcgagcagattggtggcagcagtttcacccgacttataggcaccatgcacgcagccattgccaacaatagtacaatgctcaccagcgaactgcaagcgactggatttgtggtttttcaacgcatcaaccagcagctgcggctcatctccaaccttgtcggcggagtaagtcccatacccagccagtgggtcctgggtccaatgtgtagtttcaacattaaccaggctaggcaaagccttgtatggttctgtgcggaatatcttgaaaagcggttcaaaaaatagatatatccccttcggatcttgcatgttctcgatgcgctgcgtcagaggttcggcaatctgtacgcacagctctttgctgcccgtcataatccataaattgattgtcacggtggcgtaatttaggatattatcattctccccgatcgagtttatactggggttggactccatggatgatgatgacccggttgaagtgtccgtttcctctgatggagatgggtagaagacaaactggtcattctcctttgaccagaagacttcggcgaattcgaaaaacaccttgcccaaggcgccgtagctgcacctagacatgccctcttggatgtcacccggtaagggcgggttaaacgagatgaggttgtggtggtagacccccagtgggctagtcatgataactgcatcgccctggatgaacccgacttctccagcagcatccttgtaccggattcgagctggtgccgtcccgtgttcgttccactccacgtcctcgacgcggtggttgagtctaatgatgtttggatcgcttcggagcgtctccgcagtccagttcacgatccgatcatagccacccttcatatatacattgcgttcagtgatgaagtaagaaagatgtttggacgatgcttggtccgtactagtgccgatccacaattctacctcgcggatagcctgcggagcccactcacgctcatcttcggtgatgagctggtgctggagaacgaattctctcgcaaattcctggactggacgatcctcagcctctgggttagtttcgtagaaccactcgcaataatcagcgaactcgtctgcaactttcttagctttgaactgggatccagttcggccgtctctggtgaagtatagaggaacgccatcgtcataataatatgggatagatagctggggaatgagtttcaccaggctgttctgggaagtttcatgcatccaagcggcacctattgactatcagcacagtccccccctgtttcaacctcgatttcgggtttgtgtcattatcttaccaatatctcggacatggtcaccctttcggcttgtcaaaattcttccaccaatgcgatcgcgtgcttctaataccaccacttcgcagccatggcggtgcagaacagccgcggcatgcaggccagaaactccagcgcccaccacaatcaccttcttgcgctccgacctcactgcgtgtgttccctcgaccaactccctcggagtcttatcgagcgcagccaggtcggagcaacaattactcggttttatgggattaatgcccgttatgagagaagaaagatggaaagattgagccatgctgagctgacaagttgacattcgatgaagttattgagtaagtaaggatcatgttgaaacgaagttgaggggcgttgggctgtgctatcgtggtggatagcgaccactggagactgtagtattattggcttttattgcccgcagaaaattggctatctaccagacttcaggttccacggttattatcgcgtgcataaaaatcagtggaataaactcttctggttacatggatggttctaaactgtatacggaaagttttatagtttgtaggtctaatcagacatttatagacatctctaatgacatctgaaagaatattgagcagcactaaaaagatcacgtagtagaatcgtaatgataacgattgttcaagtccgtatcaccaagtatgaaggctgtataagcaagcatttcgtttctatattaatgactgcagttgatctatcgaagcaattgtcttcctagtacccgtcatgtgcaataaacgtcttagctcattggtgtctcattttttgataagatccattcctctcaatttaatattgaatcacccaaagttgaccttgtataatttagatgatattttccctttagctagttcgagggtgaaagaaatccgaaggatcatgcccaagtaagtaccttttgtatgggcacaccatacaaagaatacttaaacttttgcagctgaaaatcatgaacccgccccatccgcaggtgnnnnnnnnnnnnnnnnnnnnnnnnnnnnnnnnnnnnnnnnnnnnnnnnnnnnnnnnnnnnnnnnnnnnnnnnnnnnnnnnnnnnnnnnnnnnnnnnnnnnnnnnnnnnnnnnnnnnnnnnnnnnnnnnnnnnnnnnnnnnnnnnnnnnnnnnnnnnnnnnnnnnnnnnnnnnnnatccgcaggtggggctgggagagacagttcagattctacggagaaggcggagatctgagcggtgacctaaaagcccctggtggtcgctatatacactgaaatgagctatgaggggaaacaaacctgcaggtgccgggtgaattggggcaattgttcttcggtattcatcttcttccaaaaatgattttctcgtgatcttcccaaatctggccggacccgcatcttatccgcatgtacccgcattcgacctgcaaaggagtggcgggaactgcccacgtgagttccaatcagatcggctatgcagatagcgacctcgggaggtaaagtctgtgaatgggttcaaccatttacgttgccgtggagaatgcggcttttccgcacggatcccggattagggttttggagattgggagaagtagggttcgttgaaaattaaactgtcaatacggaagaagagagaaaggtgctccgtaaacaacattccaatgtggagaggggcgcgtgactcaaggctgacttcccaactgccttcctaattagtcacgtaaccccgagcacttgcttacacgaactggccaggtgattctacattattacacaagagtcttacatatcagacctttgagaatcatgatcacttgtactttttaccagcaagttgaacattaacaaaaaaagcttaacaagcgatgcgtaccactccattgaacatgatttgaatgtgagacctgtacggagtactccgtagccgcgatatatatagacccatataaagcagacgtaatatagcaacatatcgtaagcgatattttgaaaaagccatatgtatatcaccgtgctacttatacataaaaccaataggtcagttgccttactattactccaatgttgtcctagggtttcatttagaaaagactagagacaatgaatgatacgttagaaaagcaaattagataccaagtgatctctatacaggaactttagagctcttcttttgtctagaacacgtatataggagaaagttcagaaaataaaaaccaatctaagttgacaagttggcattcaagcttgaagttttgatcacacgaccagaagttgagagatctggggctgcaataagccatttagggtatgaaaatacacggcagctttctaaaatggccttgttatctcctcggtcctaccttccaaagaacataacatatgtatataaaccaaacaacaaaacgaagaggactacatcgaattctatagggccctgaaatgcttggcccatgcttatctcgggcaggagccccacacgcaaatcgaaaattcttgctctcacaattttcccttttctttcttcttcccccatcatagaggctgatacgctctatttttcctctcgataacatgtctccagcatgaatcactcgccaggtcgggttttaatcagattccgattttaaattcagaaatggaagaggacctgcagctcaatggcaccgagcgcatctgcgttggcggggagatcacattaatcccctcgcccaccaactctccaaatgacccactcaattggagcatctggagacggtactggcattcatttctggtccttgtgtttgttgccctgaccgcggcaaccgccaacgatgccggcaacgctgggaacgggatgaacgccgatctaggtatcacgtgggaccagatcaacatcgccgcaggcgtcttgtttgttggcattggatacacaacgttgctcctcggcccagcacctttcctgtatggaagacgtatctcctatctgatttgtctggtgttttccatcattggctccatcgggctagcctgcacacaaaatgtcggggacaacatctggagccaacttttcgtgggcgcctccgaatcctgcgcggaggcccttgcccagctgtctctttcagatctgttcttccagcatcaaagaggcctggtcctgggattgtacgttcttgccacgagtatcggtacattcacgggacccattgtgtccagcttcatcaccgactcttacctggggtggagatgggtgggttggtttgctgccatcatatccgggggcttgatcgttatcttttacttcacattggaggaaacattctttgatcggaacaaccctattcgcgggcatgatgcgccttctgtcaacgctgagtccacgtcgaatgacctccccctggagaaaaaggataaaccaactgccagcgtacaacgggcgccctccgacggcgaacttgacgaagaatgcggccaggagaaaggaaagacgtatttccagcgcattgccctgatcacgccatcgccaaccctggtcgggaccggcttcaagcagtattgccgtcgcctgttgcacacactgcgcgtcttcaccttcccggcagtcctctattcgggtcttcaatggggtgcccaagatgcctggctgaccttctacctcaccgtggaagcggacaattggtacgaggcaccctggaactacagcgacgctgcagtgggcatcatgaacgtgccgaccctgatcgggtcagttctcggctgcatttacggtggatggttctccgacttcttcgtcatgtggatggccaagcgaaacaagggcgtctttgaggctgagcagcgtctctggctcctgttgcctgttgcgtttatcggtcctgctggcctcatgctattcggcatcggttcggataaaggctgggactggcatctgccgtatctgggactaggattcattggtttcggatggggttgtgcaggcgacctgagcatggcgtatctcatggatgcgtacccagatatggtgttggagggcatggtcggtgtctctgtcattaacaacactattggttgtattttcacattcactgcccagaattggttggatgcgcagagtcttgcgcaggttttcattgcgattggcgtcttgagcttctgctttattatgacgactgtcccgatgatctactggggcaagaagtgccggaggattactcggaagcagtacgaggctttcctgctggttcgtgatggaccttcttagttgagggtatatctagctcgccattgtcattcttcgttcattttgtcaatacatcagcatattgtaataatctgtgtgttttgcggacccccacctacgctgacagaatttgccattcctggtacctacactagctggcggttcttgttttacgcttgtgggtctgcagtggcgtttggcagtagcagagtgagggaaaagaacaggagagtccttttcatttaggacatcgttgtcaatcgtatgaggaccaaccatcttggtggccaaatctttgataggccatgtctgccaatcatttgagataaaactcagacatggcgcaatttgggcatttctagttccccacagaggaaaataaccatcaggcactcacaattgtctgaatagtagtatggtgcttcacatcaagtcaatgtgcgtaggccgttcgtcttcgatttggtcgggacgcaatccacatgacgtgtcaacaacatatatccgatttcacgcaataaataatgcagcacagaaagaatatcgactgaaaccccaagatgctagagtcggggaaaatattctcgggcgtacgtagtcctcccgctagctcctaactatctggggccaactacgcaagctgccccgtcatctcccatccaagctttctccggtggatcgccaattaattgcacggccacaacgaatacatgccgatattctacaacatatacatctcatatcgcccgagcctgctccactatggttcctgtgcacggagccaatcgctatcctccgatgtggtggctggatgtatttgcgtcgtggtcgatgcgatgttccaaggttggacctattgacgcacatctaagaataaaaatagcggacccaagttcatatatatcttgctctcgcttgttcctgagactaaatcctaaatcccactgtttataattcctggggattcgtctgttttctcaatccttgtcgatcgttctgtgcattattacttcagtcgttcgctctatcgctctacagacttcaatatgggcttcccgtcttactgcaagtgggctgctctcgccttggctgcgactgcggctgcgcagactactaccagctgcgaccctatgaatagtatggactgtctcatgtacttcgctgcggacccgcgctgacagtttggtttcagagacttgcccagcagacaccggtctgaacaagtaccgtctcaacaccgacttcaccgctggatctctaggtcgctggaacaccaccgccggcaccgtaaccaccaccgacctaggcgccaagttcaccatcaacgaacagggtgacgcgccgacaatcgaaagcgagttctacatcttcttcggccatgtcgacgtcaagatgagaaccgcgaacggcaccggtattgtcagcacctggatcctcgagtccgacgatctcgacgagatcgactgggtgagttcaccggcatcagacgccaccaagcctccaatcccctcaaatagcaaccactaacgcaatacgcaggaacaaatcagtacctgggacactgaagccgaaaccgactacttcggaaaaggcaacacaacctcctacgaccgcggcacaaccgtaacagtctcaaccccagaagaaacattccacacctactcagtcgactggaccgccgagcgcatcgagtggctcctggacggcgtcgtcgtgcgcacactcgagtacgccgatgccgtcgacggcacaaactacccccaaacgcccatgcgcatccgcatcggcatctgggccggcggcgacccagataactccgagggtacgatcgagtgggccggcggcgagactgactacaccgaaggtccgttctcgttctacgttgagtcggtcaatatcatcaactacaccccggcttccgcgtacaggtacaccgataagacgggcgactacaccagcatcaaggcgacgaacgctactatctctaccaacttgggctcgtcgaactccagctccagtgtcgcttccagtaggacttcgtcttcggctaaggctagctcgtcgttgattgcttcttcgtcggcgtcggcttctgcggcggcttcttccatgagttatgtctctgctgccccggcttactatagttctatctttgccatggctgtgggatcgttcgttgctggcttgatgcagttttagatgggtgtgttgaacatttaataggtctcggtggtttggtgatgagacccggtctattgatatacgcattattgttgccttccagtcattccttttgtgaattgtcggccacttatgcggcctggcatgtcttttttcgaagtctttttagatgctttcttgaatattctttagatatcttctcccagaagcataattcgcaatatctacaacatacgcaactaaaagtcatgaaatgtgcaaaatgattttccatatataacatgtgattgctctgactgatattggtacatgctatccttctttccttctgcgttgaatccgtacatacactacatatatatatgaagctacaatggaatcaaactgttttcttctgagttaaggcatatgaaatgaaaagacagagacaagaattagagggggcagagtcggaagacgggatggcgcaggggtagccgcgtcaatgttgacgacacaccgacccagccaaccttagaaatcaattttcccagccttaaatcttttcactagcgcaacaaatgaggcctctactaagaggatgcttcaacgctcgcttatgggcaagaataatcagaatccagccggggataaatcccgccgatcgcattcctggcagagcctcaccgacgacagccttctaattgagaccatcatcaacattggaccaccaccaaagagaaacccggatcctttccagtgcatggagtcccgattatcgaagcagactagccagccgaagaaaaactcaagtatgttcgaagctaggctggggcagttgtccaagtacatggttggcatggaaccttaggtttgtcaagaacaaacaatttcttcttattcaagtagataatagcttataaccacagagacaacaattatgtcgcattgaaaacctatatccacaagttagtatttcaccgtgagcgctgcacacctggacgtgggataataaccgaccagtgtgtacaaccttgcattcggtatgcaggaaatccaagcctggagtaattccttcaggatatatttggccatctcctctgggactctgttctcggcattctttctctgagatcgaagagactgatacacgcgggttcttgaaacagtacgatatatgtctgccagatggaccagcgactgtgaaagaatcaaaggattgccgaatattctctctccctggatgaacacttgacatgtggggagcaatttgctggtaaaatgggggcactcgtttatttccttgccctgtatagatgttgatttcggtaatttattagtatgcgacgacgacagcgagaacgccaagttcaagggtatcgaagactccgagatgacctccccatccgcatgactgaaccatttgtctctagctatcctttcgaaggagggaccgctgcggctttgtggtttcggtgaggctaggatcgggcctgggccgtatgattatcttgccatgccatgcctatgccatattgcacgccggagatgatgctcgaggtgccgtgagctatccggtcgatattggtgtgttgggcttgcagtgcgtttggcccgtattccgcttctcgtggcttcttcttaacacaagtcctgattgtttcaatataggcatgtgatctccttggtctgaagaggcttttcggtgctaatcacactgccgaagatttgtatgaagcagcccatcttgcagggtcgattgttgtgctgggtctgccgcctgctgcatttctggcgcttagtcctgaggtggtggctcacttctaggatgaagatggtacgtgtgagattgcttgatagatttggtatctgacaagacttgttgctgatttgattatctaggaaaatggtagaacattgtctccccattcctgggatgggctcgcttgaatcgttgggcggtcagatggaactatctatttgcctctttcctttgttctttccttcccaaggttctttcctttttggggttgtttaccactttggctaagcgagacgttcgacttttgcagtgtttgcagtagggccaggtatatgaacaggctgattcccacttctgcacttactttttgtctctctcttcatcctttttaatcaactcaaccacatcgcagcgcaatccatccaacatgcctgccacctgtcgtgtccatcatccatcacatgacttgtctgctcttactatatcttttttccataacttacatttatccttcggacatcctatccacatcacaagcatccattcatggcacctgtcattttcatcatccatcaaataactcagccacgtcagaagcatccttcaacttgcctggcatctatcgtacccatcatccatcagtgacttgtatgttcttgctgtctcttttcttcatatacttacattcattcttcaggtaaccaccatatcacaagcatccattcatggcatctgtcatgttcatcattcttcagacaacccaactacattctctttccaccttctactttatgaggtttgtttcttgtctatattgtcacctattcttcatcttcgctcgtcgtattacccagtgacatggggctgactgtactagacatgcgctcaactacatccagccttaccgtgataggttccggcttcaagacaatcggcatgcttataacaacagcaaacacaaaagcaaaaacacacaaaagcaaaaacaaaaaaaacaaaaaaaaaacaaaaaaagaaaacacctcgaacgatttcaatcaaccactcccagtatcacttcaaacaacattcaaacaatcatccacttcaagcatcaatcaaccacattcaaacagccacttccagtatcacttcaaataacattcaaacaatcatccacttcaagcatcaatcaaccacattcaaacagccacttccagtatcaacttcatacaatcatacctttcaagcatcaacttcaatcaaccttcaaccaaccatccactgcaatccactatcgacattcgactactacaatgcttcgaccttaaaagaggaggaatgaaaagaaacggtcttgaacgaagaagtctccgcaggagtgtctctgaaggagacttctcgtcgggaagaggttacagcgtgtacccatttaaaggagactctcaagaccgtttgctgtggtggtgtaaaaaaaaagctcgcctcgacaagcatctatatacaagctctatctcaatcatccacttcaatcatccaccaatcaactacttccacccgcatttgtgaaggtcatgcgcaggacttttgacatggatgccaatcggagagtgactgctaaagatcttctggagaatccttgattgaaagactgatgtcctatgtataatattgagactgcttgatagaaacatctctgttcaaaacatgtctaccagtgcttttgatatattatcattgaattaggattcaaagtgggcagagtacgtagcgaattaagaccaagacaacattcacccacggtttctatgccattgtccgtcgaattacagcaaaaaagaagattcttccaaataccacaaattatcaaagacaaaaaaaaagtagtgcatcatccgtgaatcgaacacgggcctcgtcgatggcaacgacgaattctaccactagaccaatgatgctagttcatgtgtggggactcggaagttgactatatgagggaaatgcttcttttgtgcgatgtcggactccacccatgttgctgagggcgttgatctcaattgggacataatgtaatagggtgatactaagatgaatgctagaagttgcttgtcttgtatatttcatatccaatgaattattcttagtggttatgttggttacattattactgctgagacatattatatcctacattgtatatctcagagatggatttcaagtatatgacaatgacaatattcacgtctgcaagacaataaatagttatgcacacaaaaaggtagctggtcattaagacattaatatatgaacagacacttcaatgtgcaaaaaggcagactccaagcatagaaggtaaaaagatgaagaagatgcaacaaaaatgcaacggagatgcaagaaatggtatatagagaaatcattgttcatcagtgttccgggtaagagggttgacgatactaggtaacgctggaggaaaaggatattgatcgtcgaagtggtccagctcacttccgtcgccactgtacccaatgctatcgcggttgtcatcaatgatgcgtccgtactcaaggagaaggagatagagatagatgtcaagatccgcgttgcgcagcgcgtgctgcgcccattcctgactttgagatgcgattacctcggcctcaaagtcatgcttctggatgtacggttcgccaactgagaatgcatcgacgggggatacttctgggtcgagaccgaggaagtaggtcattaatccgtacaggtcatcgtagcgattgtccatggggacgaagtgacgccaggggaagagtcgggagtcatgccattctcggaaaatagttgctttgatgcccagcgacttgctgagctgaaatgcgcgccagcgaccggaaaagctgtggccgtcaatgtcgacgaggtattttgccttgaactgctcgctgaagtccttgggctttttgtaggtccaaacatcgtcgtagaaggagcagttcgggatgcagccccaagcctcagtgaagccgacatcgaagtggtccagtgaaaatttgcttggggagaagttgggataggtatgataccggcccgggctggtctcagagaggatggagaccgtctctgacctcatatcagtactgttggtaatgtgcacaaagcgttggcgatgcatatgctgccaattatccgcaagttgaacacccccggaggtgacgccgcgccagaggagagtgtccgctttgtctttccacttgtaatcgtgtcgcgaattgtacacgtaccgcttgtcgttcatgaaatacatattcgcgggaaaaaggatgtcgttgttcacgctaaccttgcactcgctgaagaccgggatcagtttccttgtgatgatattgctggatgctgagaacaaaaacccgtggttctccccgagaacggaaccgacagtgcatagatcagaggatgcagtaaagttggtgataaacccacccaagggcgatttgtatagcttatcggcatcctccacagtgagattggcattccgagcaggggagtcagggtcacaggactctttggcgaagtccatataaagctttccagcgatggagaaccaagacgggtcaacacgatcctcgatggtggaatctttattatacaggtgtttcatgcctggagtgaattgatcctgcgcatcgctgggtaagtttctggtgagggcctcggtacggaggtattcctgggtatcctcgaatgtaaccatgactcgcggttgatccaaaatattaagcgcaatatccatgtccggcagataccgagcaatgcgtttaatcgactttctcagtgtttcaactctccacccttcaatgggggagtaaacaaccttcttattgcgaatctgcacacctgcaatcccgtcgctgaattgtagcttggctgccatctgtcgaatttccgctggaggtaccgcccaaaaaggtcgcagatcgcccgtaatctgttcgaagtcgtccacgttatgcgaattctttttgcgtgcgaacatgtaccattccttgaaaccgggaggtgggtgtcgtccatatgtctcgcggtatttggcgacggttcggcggaaacttgtcgagcgaccatggtcatattccagccatttccggtccgcttctttcatcaggtcggcaatagggtgttcatcgtgcgcatactctccgaacacggggttcgttgttgcggtgaagagccccagattagggaggcggattacggagctgtcgaccgcatgggtgaggaacagaaggttgatgaagcatatggaggttgctgcgcaggccagtagcaagtagaatgccctgcggttccgagggaacgggcggagcattgagaattggttcccaaggtcgggagctacccaggtaggttctagccgcacaccaaatctcgacaatcttacagggattattgaaaagaaatcatgaaggctatgaaaagggggtgaagaaggacataattgtagcaaacatctaggagttgagcagaggaaaggaaaaaaaaagagagccgcctaaggccccttagcctcccacgtctgtcttagggcgccaagggttttacaggcatcatactaataaagttcttggctggtctttccaaggtttgatttaaattacatttggtgtttcacctaagcgaactataagcgacctataagcagcctatcagaacaacatgataatatctatcggcaaccttgtgtagaatatgtagatcaccttgctggaacgtggccgagcaatccgtggacgtgcccgatcaggaacccctcggcggggatgaccgagcagaggccgagtccaatttgactcggatacggtcggctcttggtatatgtgaatattggaggatactcatatatcgcatattttagaactgatatattcacaatcaatcaatgttttaaagatcatttcacgactgatcaaacatgcaaattagactaataaacattagggttattgcccacgggttcttcatggcccggcggtgagacattcctgactcggctcttacataagccagatccttcgaaggcctcaggcacaaacccgcagctcagagctgtcaatgcgactcccacatcttcattacttctttcgacgcgcataatctcttccatgcagatgacgtgaccaattactcctcatgggtgactgtcccattcgaaaatcatggctctaaaacgtactcgcgccgcgctcgaggccgatcttcaagcagagcaatcaccatacgccttctatggaactccgttaccaccactcgacgagggagttcgcgatgatgggtcctttgtgccaatatggaagcaggaactgcgggacgaaaacgggagcaagcgtcttcatggcgctttcaccggtggattcagcgcggggtgaatagccgcctctaaacaaacgacccttggaaggacaaccactgacgtctgttagatacttcaactccgtcggctcaaaagaaggatggactcctgcgacctttgtctcatcgcgccagaaccgtgcccagaaggccgaacagaaacgacccgaagatttcatggacgcggatgacctgcgagaacaggaagaatccagacaactacagacctccgatgaattcgccggctttggtacaacggagctagatgctacacgcagagcgggactcatggatatattgaaaaccagcggagaaactatgggagtgaagctcttgaaaaagatgggttggcgcgaaggtcaaggtatcggacctaaggtgcggcgcaaggccaatctggacgaaagctctgctccgggtggtgatgcggaggaaacatacctttttgctcctgagaacccacccatggttgccttcattcgcaagaccgaccgcaaaggtcttgggtttgaaggcgaatcgcgcctagagtctcacaatgctttgccatccataccagatgctgaggaatccgattcgttctttggggggcgattggctatccaagggaaagctcagcccccaaagccgaaggaatcacggcggggaggacttggagttggccctctcaatgacaccgggtcggacgacgaagatccttattctctgggtccacagatctcatataacaagactattggaggggataagaaaaagaagaaaaaggccaaaccagaaccaacaatcgcgtcatccaacccactcctaaattcaaagcccgtgttcatatcgaagaaggtggcagcatcacgcggaattggcggtttcagaaagtgccgcgacgggcgcctaccgctggatggattcattcttgccgatggcatctcgggaatgtcgatttcagagaagaaatacgatcctcctgtgatacccgagggctggaaaccagccaaggagatatggtcagaaaaacgagataaatcaaagtatgtctctacagctgacgccgcaaaagcttcgtcgcttaatcccacgtccagagcagcacttctgggcgaggatcaactgcctgggaagtctatatttgattatatgacccccgaagcacgggagaagattgccaaacttaccggcaacgccaatttacctccagctttaggagaaaaggcacccaaaggatacgaactccccgaatcaaagaagcgcaaggatctttgggacctcgtaccaaaactcgacaaacagactgccgcccaggccctagctcgggccggtggtgggtggctgccttaccaagaagatgagaaaaagcgtgcacgctaccaaatatttctcgaagttagtgccgggactcgctctaccctcccagaacgggcggaaggatctagcaccgatgactgggttatagagatgcaagaattttgccgagctgcagaagtcttcaaacccatatctggggttatggcatcacgatttacctcctcgtccaccgcgcccaaggttgtctcggatgctcccgactctacagaatctggactcagtagacccgctgaaaagccggacgatcctgcagtagcagctgccaaagttggcatgttcggcccaatgacccgaagcacaatccccttttacccatctcgtcttctatgcaagcgatttaacgtcaaaccaccggagaatgtgcaacttgaccctgaacggcctggagcctccagttccggacctggcacgcgctcccagtccgctggtttccaagccgaaactggcccaaaacaattggtatcgcaggatattatgaaccaactcctcatagactcgttgggttaccttccaacagcagatggtcttgatccatctggtcagcctgttagcgcggcgccaccaccggtagttattgaacctgagcgcaatgatgccctggaggcagagcggcccggcgatgctgtctttaaagctatctttgggagtgatgacgaagatgactagaattggttctatttgtaaatgcaatgagaattcatgtattttgttttcagttaaagtcctataccttgtacgaattaagcaattgtgctctgtaaatcattcaatgttgtggtggtgtgactattggagtcgtccccgcggcattaaatgcgcgaatgggcgaaattgtggaatgtagccttgtttctctttgtttctgtttcattttctgtttcatttctatttcttttcctttaacggttgcctccttttccttgacgcctttgcctcgtctccagggctccaacctagtcggtctgtgctcagcctttagatctagttcgccttagagcgttgaccactactccacgccaacccctctccaactatttcccctcctcatatggagctccttgagtacgagtaagatggtaagaatccaaccccgaccatgaaccccagaaattatacctatgcctatattatcatcaataagactggcttggcgtcgaacgtcacacgaccgaaagccccggccgtcatctccataccatgccaacccgcaatggccccataaccataactaacaaaccccacagggctgctgcgcgtcagtactgtcgcataatgtcgacaaccaaacctcccacacccaagaacgcatctcacatacaacagccacgagggataccagtgaccgcaccacgcaaccaaggcaacgcacgcggcacaccgccagcctccctctaaacgagcactataatgagccagtgcgtaaccatgtgtggtacagtaagcgacggacatggacgcgtgcgcagctggaccgcgagcgcaccgagttcttcgagacgcgcgttaccggcaggccggagatatgggccgctgtttccacggtgatatcgctgattcgcaacggtgacttggctactgcgcagggtattttagatgcggcgggcattactgttcccaccggggatctttgtgagggctgctacgatgagcaaggcgtgctttacagggttccacaatgtgttgttagtgatccggagaacatcgttccttcgtcttcgaggacggctagtgaggatggcggccctgctaggtatgaggaggagcaggatgttgggatgctctcagatagtaagctcgctgatgatgatgatgcggatgcttccggggacgagttaatttcgcaagatgttgaacgccgccgtgaggagaaggggaagacgagtgaacgggatttgatccgtgtgcttgctcgattgagtgatcgtggaggtccggatatactgctttccattggtaagggtcagactgtgggatttttggcgaggagagtgcatcaggaagccaaggttggtttttgttactgatctgttcatttcgttctctggattattgctaatttgttctttagctcgaggatgataggcgcgttcgaatcgcttacctaggtcacttgctgaatgagcgtgaaccgctcgttgaccaagggtggaagactggccatgttgtcaatgctctcatttcccctgttaatgatctaaaccttggacaccgatcttaagagacccttttgacgcatcgtcgatgacccaccactaccgccaacatcactctttttctcgtcctctctatttgaacctccagcgttctggcgtttctgtcatcggatctcttttcgcataataccccaatcttttttttacgttttgccatctacaacctggcatactctcattaccttagcatgatatctcatgtggtgatacccatactcgagtgaaagcagactggctctcaagatatcatcgcccccagctgtcgaattttgcgccccttaattacttgatctaacatctaatgtctccacactttccaagatttttgtgtcatattctcatgtaagtttggttacctatgtacatagagatccacaccaacgatgagcccgcatttcaacctagctcttccatatttgacctatcaccgcaagttctcagagttgttttagcgactccacgcgatcgacacatgcagggcatcacgtgccatgacgtacgtggagtacatgtctatcataactcctttggcgtacacctggtagctctttcaccccgcgtgttaatatcccacattttgttaggctttgggctttggggtaatgttcaacccatacagccaaaccatggactacgaggcagaccgtcagaaacgggaggtatatcgatatttccaaccggaaaatccagcggcgcttaatgcatcacttttccaatttgatgagcatctggctgcaataggagatttttcaagagtcacaaccccttttgtacccgatgcctctgcctcagagagaagttttgtcgaaggcagctctccgtcaagcccaaatacaactttgacttcttttgcacaactggccgctctacgcctgaacgcgcagcgtgcttttattacgtacattactctcctgctctagcgtggattctgatctgaccctttgcaaagtgtattgaacagcgactctcagtttatattggctgaagccacaagaaacaccaatcttaaaagctcaaggtcatccgttggggaaggggataggctcttcgctgggacatcgacattgtcagattattggaacatatgccaggtaggtcgatatctgaaatactgcgatattttacatactgacgtctactccttcaaataggagaccgttgcgattgactcagacaacaaagatggatcgtattcatttttaatcgtcaacgatcttcagcgggaagaacgattcagaggattgccttttgtgacacaagagccacactctcggttttatgccggaactcccctaactagtgatagcggtatcaacctgggctgtctgtttgtgctggattctgaaccccgtcaagggctatccgatatcgagaaggatacattaggaaaagtggcggagttggtaatggactatttattagttagtcgtcaagccgcagaagggcgacgggcctcacggctatcgcgtggtctccatcttttcgtcgatggcaactccagttttgccagcaacgctcacatgtcgtctcgatcaaacagctcagcacatagttcgtctccgcaggcatcacctcacctcagaacccgccaacctataagcccccaaaatgatgaattggaattttgctcagcacagtctggaccaggaaatgcgtctcgaaacggcgatgcacatcctatgagctcggattctaaccataatgaaatgtgtgctccccccagtccaacggaatcgttgcacagctcgcaacaggacgacagtagttcagaggattcctcgagcagcaaccactggcttttccaacgtgctgcgaacctcttgcgacaaagtctggacttggacggtgctggcggtgtcatgttcttggaggctagtgacaactcctctgaatatgtcgcagctggtcatagtgactctgctggatccacagatcctgctcctattcttgcgctgtccaccagaggtgatccgttttcataccaagcaagctctacgctgtcggatccagctgtcaatcttgacaacagattccttaaacagttgacgcgtcgctatcctaaaggaaaactctggtcatttcaccgcgatgggacgttctcaacgtcggaagatcagtcaacagacgattccagaaagcaaaggaagaagaccaaggcttcagagaccagcaaacttaatgagttcttccctgctgcatctcaaattatgtttgtcccactgtggaatgccacagattcccagtggttcgctgggtgcttttgttggactccccggccaacgcgggttttcagtcctgctgttgatttgagttcagtgtttgccttcggctcttctattatgaccgaatacagccgtgttgaatcggtcatcgcggaccgccaaaaaggggattttataagcagcatatcccacgaattgcgcagcccgttgcatggtgttttagctgcagctgagtttttcgggagtactaccttggaccagttccaagaaaccctccttgatacgataaatgcatgtggtcgaactctcttggatacaatgaaccaagttttagacttcagcaaaatcatgtcattagaaagacacaaaaaaaccttcaggcgtggaaaagatccatggaaaccaaaatcatctgaagacactgtgccgcgcctagatacattggttttgacagatgtggctctcttgacggaagatgtcatagacagcgtgtgcttgggtcattcccatatacagaagtcagccatatccaccaatcgtgccacagatatcttgtcaacactgccttccaaatcaacatcaaataccaacaaagttggtcatatctcaggagtagacgtcgttgttgacattcctgataatgactggatgtacaaagtccagccgggatcgctgagacgcttaattatgaatatccttggcaatgcactaaagtataccgaaaagggtcggatctctgtttgcatcgaggccactgagcgctcaaaaggtcgctctcgacgccaaggtctcgaagatatggtgacattgactgtctcagacacgggtaagggaatctcgaagcaatatcttcagaagaacttatttattccattctcacaagaggatccgctgtcagtaggcactggtctcggcctatcaattgttcgcggcattgtgaagactcttaacggaaaaataaatattcggagccgacagggcgaaggcactattgtcaaagtgtcgcttcctcttgaacgtctagtgggggaggaaagcccacaatcaacgtcagaaagagaaaattcggaccaaaatatactcacggcatcttctcaaccccgacgtgccagctgtaatgggaaacgagctgctatctggggaatcgacctgtctcatcttggcgagaatcagttctgggcttccatggctcggtatatcacggattggtatggtctaaggcttgttcctctgtctaccaatgagcctatagatattctgtttgcggatgaaagggatttgtctacaaaagaaatacacaatttcccaccagaattgccaagtctactcgtcttttgcagtgagactagcgattatggtgagtctagggcacaatggtcgcatcttgctggcactctggcaatcctacatcggccttgcggtccacggaaactttcccgtggtatcttgagctgtcttaatacaaatccgacagcccctacgttgaaaccgcagaatcccaggcaaggcttagtatttccagagcgacccaatcctacaggctcggctttgccaattagacagtccaatccctcattaccacgaaatctacgatcaccagatgctgaaccaccaattcccatggcggcatcgggcaattgcatcattggtcttacagggcgtagcgcttttgtatcgacatcgcgtaccgacagctctggccgcacaacatccgggagtactgattccaccaatcctgggtctttatctactcggtcttcatctgatggctctgatcatgtcactcccttgattgggagccaaagcaggcctcgggtcttggtagtagatgacaacaacatcaaccttcatcttatgatgactctcatgaacaaacgaaaagtcatggtcctagataaagccgaaaatggcagagcggccgtggatgcagtcgaaaggatgttgcagggatatgaccttattttcatggacatgtctatgccagttatgaacggatttgaggcaacgcgcgccattcgtgcaattgagaaagaacggagtgactgtatgccagccacaataatcgctttgaccggactcagcagtacacgcgatgagttcagggccctggactcaggagttgatcttttccttgtgaagcctgtttcttttagggagttatccaggcttattgatgaatgggaggccaaactgccgaaataaaatatggcgatctctatcttacttgatgcaggcttgccacccagacgtggaaggtcactttgagaattatcgtttcttacattggcgtttttggtttctttcttcatacccttgctgctatttgggctgcacatatcatggatgatgattgatgaatgatggcagtattcgatttcattatctaatttctgtctatttcgtcccatacagcttcaggggtaattatatctacagacaacacttaatggcggtaaattggacgccgaaaatgacactattgatgccattttcagcatcccttttactagaacagttgatcatcaagatcctgttattcggactggcttataccagcttatagggtgctggacactgggcgactaggacggataggcagttctagagagattaaaagcatagtcttggtaagtgagtggcccatctcttaaccttggaagtatgaacgcgaaagcagatgcagatcactgagcccttaatcgacggcttgaatatgctcaagcctctcaagtaagatttgatttgattgatgtactgcttgactgcttttaaatatgtagcctatgcatgatcaaggaaggactatgtactttccgtgacttttctctttcgtctttcggcggatcggcggatgatgtgaagccttatatctcaggcaagaaattccattacctaatcaccgatctggagcttctagacaaacagtgcaaacaactctatcgcaaagaaaaaaaaaataatttatcgcaatctcaagacagcgcagttcgttaatctcgaacttttgattgaactcaactcaattgcataccttttcaagggtagcctctgtataccttctctaagatcaaacgcccacctccaccttgatatccaggcttctcaatcgctagtcttgtcaatcctcgagataaaccgtaccaatggacggccaaaaaactccttttgtgagggagctcggctcgagtggtatgcatattccttttcttaatgcaaaactataacgctaacctatatctttagaccggaaagtccgcgacaaggctcttgagtctttaaccaaattcgtgcagtctcgcaccgatctgaccctcgttgatctcctcaaactgtggaagggcctgttctactgtatgcaccaccgctatattcgcgcggcataaaccgcagcaaaactaaccttctcccaggcttctaccactccgaccgacccctcacacaacaagccctcgcccgcgcactctcctactctctcgtcccctccctcccccacgcaactctccaccgcttcctgcgcgccttctggatcaccatcggccgggactaccactcactagaccgcatccggctggacaagtacctgatgctgatccgtttctacgtgggcgtggcattcgaggttctcgtgaagaacaagagctcaacaaagaacgcggacgggaaaaagcgcaagcgcgaagacgcagccaagcagggtcgcggcaagaagcagaagaagcaggccgaggctgaggcagagaccgccgaagacgaggaagagaaggacagtgccgaagacctcgaggctaaattccccgatctcgcggcttatatctccattatcgaggagggtcctttgtgcccgttgaactatgatgaggatcaggccccggatgagggagacccgaattacgtgcctatgccgcatggtcctgacggcctgcgctaccatcttattgacatctgggtcgatgagttggagaaggttcttgagtttgaggaggtggctggtgaggacgaggaggagactccgaagcggaagatcaagggcgatgtgcctattgagcttattttgaggccgttggagaagctgcgcgctgaaagtgcctacaagcctgttcggacgagggccgctgaggccttggaggatgagcggttgatcgagtggggtgttcggacaagaaaggccgacgaggaagatgacagtgaggaggaatggggtggcttcgaataaaaattttagttatagtaactgagggtttgtataaacagactgaattcattgcacagcgtgctagcgatatgtccatcaatggcatcacggtttgtattacaaagaagctggtgctagtcttacaggtgtaatggactacaaaatgtattcacatggcacctgtttcatttttttactgtacggcctgaccacagagtatcaaatgtctgatgtgacctattgacaaagcaccaattcccagggtatcatgagtggatgcaaagacccggcaagcaatggatatatagaagactcccaaggatgatagaacggacagcgactttcgtcccagaggcggaccgaaggcacgaattagcgaggacctgccgcctcataaagacggcctgatttggtgagtatcgtacccagtccctggtggacctcggcttggaacgcctcgaaaggcacccgttcaccatcaatactgatgtagccctccttcttgtggggagttagacggaacgcagacgctttgcggatattcagatctggcatgtcgaagaaacgaccactggggatttcgttcatcatactaatcgatgtaccaatgctgactgttccgtcaatagtgatcacgtctatcaggccgtcgtccggcaatgttgcagggaacatatttgtgtctttcgacatgatagccatatttcccgcatagaaattgcccatggtttctcccggaattacctcccacccctggggtagttcgtccgtcactgtaccgtacttgagctctggtagacctggggactctgcagcaatctcgaaacgtttggtgtcagcacccggctccagtggacgtgtagaccacatagcgtagtgttccttaatagcctccttgtcgccaatttccaccttgatggctatatcacaaggccatatggtctgccgcatcaaacggactaggaaaccgtatgtaaaccgctgagcgcccatccaacggatattctcagtactcaaatcacactcggcgacaataccaaaagattgcgagaggaaagagagtgtgcgcgaatttttctgagagatcgagacgagatccagcggggttctcagccccttgacgattgccagcgccgcaatagagacgctaccagtcccgaaggcattccaagtcaacccatttccagagccacatgggagaagtgcaacggcggtttgcgctagcgcttttcgagcatctggccgcttacccaacccattgaacacctcgtagggcaagccgtcgccagagcagcaaacgaccgcatcgtacgcgtcgatatcgagattttccgcaatttcaattgcatgacccctatgttccgtgttctgtacacccacctggcacttcgccgcggcgaaaaccggtgccgcatatcgctgatacaaactggcagctgtgcccttcccaccaaaaggattgaccaatacctttagccgtttgccacgcagtgccttgccatacgccatatcaagtagttgctgtacccatatctcgacaacccttttttcattttcggatatcgggtattggacggtcgttacggaaacatggtccttggcagcagggtgtgcgtaggcgatgacgagattagaagcggtgacttcggcgctgaggatattgtacaacgggatgtcatggttggtttctggatctaagatgcacgtacaccccggtcagaccatttccatcgacagtagcgcccgcgataacgcggtgatcgccaaaggggccggtatcaacttactagactggagtaatccgcagcagcgacggtctttgcgaggcgagcggtcatctgcataggtaagcatattcccacacactgagtgtggagtaagtagtccatacctaatatgaggagcgagttggcggcgatggtcaaagagacagattggtcgaccgtcagggttgtgccatgcagctcctgcgaggagccgtctgtggaggacattttggataagaatgaagattcaggacattatagataaagaggaacagaggaatagaggaatataagaataaaatactctaggggaagaaaggtaatgatagacaatgaaaatgcccgtatgcagccgcggagttccggtgggcccggggcatgtggtccctgcatttgaaatatgtacgaaggatgaagtatagagtaagacatttttatgtgcataaatagatagatctctctttagaggctactataatgccctgggaatatcaaaagacattgttctctatccactacgccggacgagatattcatctcatctacacaataaagagacatataagtaaaaacaaattcgtctcgaatgaacaacacagacagaagggagggggaaaaggataaaaagcatcatatagaccgcaaaccgctggaaaaaacattgacttatgcagtcgctgccttgagacccttcagagagcccaagctcagtgccaggccttgggagcgacttcttatccgcacaaatcctgtaattggcccatcgtctccctccttttcgatgctcaagtttgctagtgcatcctcgcctagtcatagtcagttagtatgtcaaatagaaaggggtagattattgcaaacataccgaacacgctgcgggcatataggttcgcactcaggaagcggcaatctcccttcagcgaagcatcgggcgtcaagcaggccatattagtgctttccatcagctgcttgaggaattcacggagagtcttggccttcgaattgatgttaaccttgttctcccattcgaactcagtccacatggtacggaactgagtctcggtgcagtgagcaggctggatgtagtccatgatgtcggcatggatgtcgttgaggatgaccacatgggtctcggtggagctggcgccgtcatagacaatgttaccaaagataacaccagtgtctgttgatgaaaccttgaccgtagcctggacgttcaagaaatcgcgtgggcctaggttgttggtagatggccgctcaacgaccttgaggtcaccgagagttgcaaactccacgcacaggttttgcagagtttcggttgtttggttaaccaacaggacgtcgagaacaatgtcgaactggtgaacggtcacataggcttcggcatagactgaatcggagaaaccagtcaattgcaccacccggctgagcttcgaagatacgtcttccacggtcgaatcgccaccagttgccttggcaagatccatttcaatctcctccccgccctcgacggcgttcttcttggtaaattggcgaatggggatggcatcgtcaatctgcacggcactcttggctttctccaccgcctctttggcagccctcttcttatcctcgacctggaccatggcgcggaacgcctttcgggtgtcctctaagaaagtaacttcgagctccttcttctcggagaactcggccagggatcgcacacaagtcaagatacgatccacagaatcctcatcaataggagccttaacgaagtgagattggccaacgcgcatgatggaaatcataataagcatggcttcggcacggagagcgttggtacgagcagtatcttgcgacacctcggaatggcgcatcaccaacttggtcaatgtcgaagagagcaccgttgccaggtagtagtcaccgtccaagataagctgacgcagaggaggcttctgcgcggccttgacagcctcaagacgagctgctgctgccgattggctggtgagagcactttcggtggcataggtgccatctgcaagcacctttcgggatccagtaggtgcggccttggaatggccattggcctgctccatcagcagggcgttgtcatccggaacctcatccaggagtcgttgttcggatgccaaaattgggatttcaccaaggctggctctgatcgtcctccaagcatcccgaatatccttctcctccagggagtattcaccaacaacccagagaactccgcggtaaacctttccagctcgaacctcactcaaagttgaaaccaagcgggcaacgattgacccacgcaagtctgggaatttctccacgacctctttaacgaacgagatcacatcgacagcggagttattattgaagtcggcaataaagtccatcagaagatcaaccacgctagcagcaatttcagagaacttgatagcgcaggagtgtattgactgtaccaatatttggcgatactcgctattctgtggatgtcgttagtaatgctgcgttgcgcaaagtgagcgtacaacctacctgttcatattgttcgtcgacggtcttggcaagttctttcttgagcagcatgatgatttcttccacattcttgctcgagaccatctccatagcaaggttgagggcctttctccggacatcaatatcagggctgctgagaacccgcagggcctccatagtcaagtcgtccaagacaccctcattgcgaattctgagctggtccacgcgttccaaacaaatgagcttgacgttgttgtcggcctcccgaatggcgagctcgatcagcttgctcgcagctgctttgacagcaacggggttgcttgtgagggcggtaagagatgttgcggcttcataaacaacggtgctagtgggcgcgtcgaggagctcgagcataagtttcaggtatcgcgactatttttcgttagtgacccaacactttgatttgagtccaataaacgcaccttattctgagtgttctgtactgcgtccttccggaggaactccaactcggctagctggagcaactcatctgtgtttggaattgtgtcaaaggtggtgcgcagatactcgagcgccttctggtgactgatggacatgagtgctgcaaaggcattgcgcttgcaggtgctgtcggtctccgattcgaggaacaactgaagcaactccggcgcatcgggaatgagcgactcggagtgctggaaaatagacgacacagcccagactgcattcttgcgaacataggcgtgacgatgttgcagacacgaacgtgcggaggagaggaggggctcaataagctctggttcgcggagtttggagaggaatcggagggtattgcctcgaatgtattcgttgggatgttgaagatcgttgcgaatgccgttactgcgaaaggaaaaattgtcagacaggaaatatcatatagcaatggccagggggatccttaccagaccaggatcatctcttgcttgagcttgccggtagaatcgtgtttggggcagatttcatagaagaagtaaagcaacttcttcaatgacttgcttttcgacggcatcacgaagcgaatgatgtgcatgaggatttgcggcattgggtctccattcagcatgatggtgacaattgtccgcattgtttccaacttggtctcatcggtgcctttctccagttgcagctttagctcctgcacggtcggctggtcggcagtattgtccacatggagcaaactgtaggtattttccagaaacgacgccatggtggtggattgggaggaataggaacgaaaagagctgcgagttgtcagttccggggttgttttggggacacatcagcatgtaggaataaacacatacagtagaggtaattctcccgggaacaggagtttgcgccagatatcaagaacaagcaattagtgtaaagcaacacccctcgccagccctgaaatcattagatgttatatgatgcgcaatggggagggaccatcaacttgtcccttaatctggccccccggcgccgtctgtgtggatgactaagccacaacccgccgcttttcaactgccacttcgacgtcgattgctgtccttcttcattcacgtacgaactctacgattgagattcgccaggatgtcgaatgagaatttctacctccgatactagtaaggatgatatgagtgagcccgggtttcctcagctgctgacggtcctcacagctcaggtcactctgggcggtttggacatgagttcctaggtaagcctacgtgccggtcataaacactttcctctacgcagtcgctaacttgcacgcagagtttgatctccgcaccattggcgaaggtagcagtgccgccgtacgatatgcgaacaactcgaattaccgcaatgattccctcatccgcaaagaaagtgagcaggagcatacacaccaaatagaaacgaacacgggctgatatagtaatagtgtgcgtgagcgatgcgatggtcgaagaagtgaagcgcattatcaaggatagcgagatcctcaagtatgcacctggattacacaacaggaagaacaccctcgctgaccccatctagggaggatgactccaagtggccacagaagaacaaggacgggcgtcaagagctggagattcggattggaaatgagcacatttccttcgaggtaattgaccgaggtatttcacggaagcagccatcatctaatactggatcgtatagaccgccaagatcggctcgctagtcgacgtgaccgaatccgacgaccccgaaggacttcgagtcttttactatcttgtacaggacctgaaggcccttgtattctcgctgatctcacttcacttcaaggtatccacaatcttgcccccatgcttgcaacatcttctgaccatccctgctttacagatcaagccgatttaagtattgagcgcataaaagaaaattgaagaataactgggtttttttgtttgatgatactcattaggcgttcattgagggttacctgggatgcgaactcaattatagcgcagaaacaatgagattgatacccctcaggcatgtctgccttcgatcctttctaggcaatttaattattctgcgtgtttgtagctgcttgtagtatgaagatgtcaaagcaagatgcaaaacatggcagaagatacgtagcttgagaatgtgtgttctaaccttaggtcccaggagtgtctccagtccagtcctgcaacgcttgatatatatccacttccctgcaatgccaagtcagcactaattcctcaagcttgggccaatcctggaagtccctcatattcgatcacctcaataacagtggtcaccgggatactgtcgggttcatatttgacgatatcgggaagtacatatcaggactggggtttcacctgggcatccagattgggcttgtataaggaaatattgaaattacttagtggttagtaaatccaaagtcgcgcttccttcaactcgtcctcgaatgcccaagaatgcctaagatgcccaacctgtcctgatttggaccgaatgttggtcatgccattgatctttccaacgtgcaagattgtatacaaagtggatgaaagccgttgattggcttgattggcacgtggcctgaggcatccaccttacataaccaatattgaaagtggcgccgcgccaggcgcagaaacagctgacccacctggactgtccccgcattgctcgttcctcaagccttaaaagacttagttcgctgatctcaaatgatccatcccccttgttctctgtttttctcacaattttgctctggagtgtcttgcttcgattcaatgtcccgtcccctctttccctgatttgcaatgccgactccgagtaacaactcgatcgccgcggcgatcgccgcccgcacgacatgtccaccggagcccgaaaggatctcggcttggcgagactcccccgatagtgtatcgaacagcgatcctatcgatgctatttcacctgataccccaattgcgccctccatgctgagtcgatctgatgatgccggtactcctgagccgatgaaagcgggaggaaagccgacgggcgtcgaggaagatgacccagtcagggctacttcacctgtcgagtcaacctgccttcgcagccagtcaccagcagcgccctcgggatcctcactcctcaactgggaattctccaacgttcgtgtaagtatcgaggtcggctatatccgaatattctcaccttctgaccatcgcattagctcctcccgaaccacacctcgtttctccgttcaggcagcaagttcgctggaactcagcaatcagaccgtcaagtctacaatgtcgatgtcgagattaaacatgttgatatggccgagtcttatctctgtggctaccttagaatccaaggtttgtgattcgtgcgcatcagggacgtgcattgaaccttgctcaactaatgtttgttgttctccacaggcctaacagaagatcaccctaccctgactaccttttttgaaggagaagtgatcggcaccaaacacactttccagactcgtaatgaggaatggggcgcctcggaaaagacagacttgcaccattggtctcggtttcccgcctggcgtccgctggctaaacaggccaaaagagcggatttcacataccgcaacttcgcccagcgtgaacatatattcatgagatggaaagaatctttccttgttcccgaccatcgagtacggacgatctcaggtgccagcttcgaagggttctattatatctgcttcaatcagattgagggaactgtgagcggtgtatacttccatgcaaagagcgaacggtaggtggatgttttgttgctgaagattctcgatttgatcctaacaccatcacagatttcagcaacttgaacttaagcacgtcgaagatcgtggatgtgcaccagcagtcgaattccgctaaatatggccgaacttgcttgctagtgccaaaacgatctcatatatgacttcgtacgtgactaattcggtcctcgtgtgtctcatatcctcttttgttattatttccgatactacacggctaagtagtgtttcttggtcaccattcagaacgagaagcttggttctctcggaactccattgagttcactatcccgtttacctttcctcaaataccctctacgctctcagtctcctctcccctaaggctattggagtgttgatcatcatttcgacagctcatttcatgaggatttccaagaccatatccattttcaggcaaagtctaaatccacacaaatcatcctcagattgaccctcatgtttcacgatatttcaatatacgaaacggcgtttccgtccccgattccggcgacctggttctggttacccttcgtcctctttggagtcctaatctctcatttttcacttcttgttttcttattcctcacctatcttctgttaaattagtgttattatctttcatccaagctgctggttgaccagcctagttattgaaaaacctcactaggtgtgctttgtaatcgtatatatgctcttagactctagggctgtattgatattgctattggcggctccttcgctgttccatccatacaatagatcacagcgcaaagaaacgggcattcttagggactatagtcggctcacaactgccgattaaacactaattaggatgaccaacatctgtataaaacaacggctgggcatgtatcaatcggacacgacggtcgatcgttgattgttcgatctattcctcccgtaatgtacagatgaaccaagtgaaacacgtgaatttagaacaaagcacaaatacgattactacgtatacaagtagcaaaaataaccatgcgagaaacgagatactaaagtagacttggtcccaatccgtttacgtccgagggccatattgagaaatgccaaaagatcgttgcgccccagatagaaactcacgcgtgaaaacgaaacaaataaagaatcaaggaacccaaagaatgcatggacctgagtttcaggacatatgtgaatgaagcgatggttgcagtaacatgagatgacgttatggtatgacttgggcgaacagacgttaaagcaagaaaaagaggcgagcaggggtatcacatgcgatgccagttgaagaatggcgagatcgagcgagtttggatagaaaggacgcttttagattccatggtaatcaatgttcagatgtggtccacatagagagggcgacaacttataaatagagattaggaaggaaggaatggcgcgagaaggagaaaatcacatatatgccgagttttgacgagagcttgagttggaaccgccgctgctgtaatcgctcggagtaggagactccaagacaacttgttgacgaatggagatgatccattcgtgctgtaggagctcggcggcagtggcgcggcgagcgggatcgcattcgaaacagcggcgcacgaagtcgacaccctggtcgctgagttgatcgcgagatgggagcgcgggctgtttgccttgagcgatgttgtacataattgcccactcgttgtccagcgtggaccatggccggcgcccagttgccatttctaggaccacgcagcccagagaccaaatgtccactgcgccttcgcggttgtccagattcgcatcgccacggatcacttcgggggacatatacatcggagttcctgtggtggtcttctggtttttgcgctggttcgtgggatctttggccggctccttgaggccagctacagggccgtctgatggagcaactgtgcgacccgagcgagcgatgatcttggctgcaccgaaatcgacatacttaatgacaccgttgtgatcaagcaggatattctcgggcttgatgtcacggtgcacgatatgtgcttcgtggagatacgctagaccttctaggagttgaagagcataaaccatgatgaccgtttcgtcctcgatacgtccgtgctctagcaagctagcgagcgagccaccggagcagtactccatgaagatgtagaccttgtcacggtgcacctcgatgccgtgataggagacaatgttgggatgatcgagcacttcaagcacgcccatttcgtctcggatctgctgggcgatcttgggaatgagctgggggtcttgcaggcgaatttccttgacagccatcaaatagttgctgtccaagttgatagctacatagacagacccaaaggtaccaccgccgatgaactggccttgctgccaacgcagagtgacgttggtagccgacgatgacagcacagtgagtgacctgtcagcctcatcagatccttctagcacctttcctagagcctggcgcttcgcatcttcctcgattctcctatcttcaatctccacaacacgcgcgtaccatgtgtcgcgaacgagttttgatgcttcctcgtcactagtgatccgaccagcgccaatctgtcgggcgccgttgcgttcttccatacgtttctcgttcttcgccgcaagcgaggatcgtgcacccatgatgtcgaagtgagagatgagaagggacatgcatcccgccactttcaatctgaaatcactgaactgttcttggtccatagacagaagatgtcggctggatgtgatcgccatagcaaactccaaggctgctacagcccacttgaacgtctttcggtccgcagcgtcacactcatcacagatgaacgcgacccagtcgagagacaactccactagccgggcgctgttcatagcacgcctgttagcgtcgacatagttggaggaccgttttccaaactctgttgcgaatgcatagcaggcctggatcaaatcattgttctgccagtttctctcattcagctgatctttgatgatagccacactatccataatggtcatggacagtttgaaagagatcttcttgatcttattcaactcgacatttacacgtccaaggtttgcacgttgttcaatgaccatatcaagttggatgcccgtgagtcgtgcgagctccacacgtgcattctgcagtcgttcttgcatgcctccaacaacaatacgtagcttgcccagcctcacatccgttggatgttccaagaactccatttgcatttcctttcctccccaagcaagaggcctttcgggtcggatggccaggacatagggaacatggatatcctgggttggatcatcttctttgaaggaggtagaaaggataccctggatatcagcgggacggttccataatgcatgatgtgcaatcagatacactcctttctgcccgacggatttggtagaggtgacaaggaaatggtcagaaattaagagtgcctcaaagaaatcataggcgatatagctcgtgatgttgtactcggtagcattttcaaacaattgacacagaaacttggagaatcgatagagcttgcgctgacgaatacgcgttgaatccaagatgctcttgtatcgtttgtccatatcctgtacagtttccttgggtcgcgggacgagctcacgctcaaaatggatcatgagacgctgcaatgatctggcagtgagggcactgttgttctgttagttctggaaacgatgcaaagcacgggaaccatacctaaattgctcggccacctcaatatctccaccgtcaagccggcaaccgatatcataggagaatccccattcctgttctagaatttcggcctctttgaaagtgtttttgttggcattcagcttccaattgaggagccggaaatagtatttcatagcatccaataccgaattgtcaaagttttcatcgacacatggcggcaaatcccagccgggttctggcctcgatacatcaaggtagcgaaatttgatatcgaccgccactttcatcaggatttggaattgggaaatcatctgatcgatcaaaatgggggcttgctgggctgggtctttcatgttcttggcataggacagacggactcgaatgatttcctggatcaaccgagagggaaagttgatcaaagttagtagttcttcgatatatggtggcaggtgccgcgcagcaaatgcttccgagttctcaattaaagtagtctttgctttctggatgacgacgagaatgcgaagaagcatgccatccttgtcctggagcgtcttcaagccatcttccttcataatgcgatcaaggaaggacgaaccatccgaaagatcgtcctttgcagacttcatcctcggctggctgaaatcgagagcctcgttccctacccagctctgcagcacagccaactcggtattgatgagggccgttatgttgtgccacgcaaagatggctgcgcgactagaggtaaattcctccgaggcaacacgggggttcgccagttccatttccttgtgcgaagagtagagaatctcgcatcgctcgaccttctccacaatatcctcgacttgctgttttggcggttttccgatctcagtctcgcctttaatctggaatccaatgatatcctcaatcacaggacccagacgtgaccgtgcatcctcgatcaactttcgctgcagaggaatacttcggccgcacgtccttgcccgaacgccaatccagagtgcatagctctgggccgccgaccgctttgactccgcggatccgatgagtcgctgcttttcttgtttcacgacatctcccttcaagactgacgccagcatggaatgccactcaagcctctcctggttcttgggatgtttcaattcttccgtacttggtagattatcgtccgggaggaaaagttgagtatcagggtcgtaagaatcatcttcaaacggcacttcggaggatggagagggttcctccaagtcgccatccccttctgacatgaggtttgattgtgagtccttggaatggtgataccaggcttgtgggttcgctcgaatccgttgaacgtaggctttctcttgggcacgatattgcgcgttcggatcgcgtcggttccctcgtttgactgacgatgatcgttggcggtcttcctggagactgatgtattgcggtgggcgccgctgtggggcatacgtatttgatggcgttcgtgccggggcggacgggcgctgagggcgcaaatcgttagaaattgcatcaggcttctcaaggagagtggtagcgccaatgctaattccacgtggccgtgctgtcggtggattagaccatggggtaataacggatgagatgttcggaggggaagatgtgatggtgctcgcaggtgtttggatttggtcgtccatggtctctccaaatgatgagttggctctcacgggatactgggggaattcatcagaagaagagcctgagccatccgaatcagggctggggatttccggatgctgcatgatgattatcccgtgtgatggtccgagagagcacgtctggtgttggaccaaggtgataagaggcgaacacttgtggcggtgcattgtggctaaccggatgacccgtatctccacccattactgtttgatctactgggaatctttcctattttaattctcatgttgtaactacgtggcatcaaacttgatcctgtatttgtatgaagtccgagccctactacagaatatacgcgtccaatcttcagtcagctgctccattgctcagtccgtgtgatctgtgatctcacaatatgctccatccttgtaaggacttctaatacttgctttttcgtggctttgcattcgagattgtgaaaattacatacaatgcataattaatccaagattgtaaataagctctatcaatccttttatcatctcgttctgctttgttatagtttacgcttgaaattggtaaaaatatatttctgtaaaacatattttgaaactcttgagcagttttatatagacttcattgggctagttacaaggctttttaacatctgcttagtaaattttctatattctaactaattactccgtagttaactaactagtacgtagttcgagaaggtgaattccaaggcattacatagtcccttctggaatgtgaaggggctcaagtaacaaaaaggtaaatagaaattaacatacagtcattggttaacgagccaaattaagttgcgagaaatggtccggggtaagattgagattatataagagagtgtataactttctcttcggatcgttctgtgaacaggtagtgattagtaagtaagacattaaagttatgggtaattcgattatattcctgttcagataactagagagccaatgtcttccgagaatgacatacctactgttgagtggttgtggcaccacgatgggtgaatctcaacatgagaacgccttttgtgatatttaatagggtatgtatacgttcagatagtgctaagaccctgttggaaagaggaaagagaacaaatgacgtacattgtatgtaggcatcgagaaaagtcgaatcatttgaactatcggacactatccggggaactagttaaagaaatgagcatgtgacatgactggacatgctagaacttcaaggttcgaggagctagtgcactattttcaaactattggagatttacccctgactagagtaacattgcgtctaggtatggagtacatacatcgatcgtatgtacatcgaagagtcgatcagtggatcggtgggttcgagaatacttcattgaagatcattgatactttgcagcgggtcttaaggtattacctgcatagtctaatactctaaaaagcgttaagatgcaatatattccctttccttgatcgaaccagacccaagtcactgggcatcggaatagagcatacagcacggcaaaactgacctatgatcgagcctacgtcatagatacatacgacgatcgaacatctgatgttgctgaagaaaaatagagcaagaagaccaaagcgcaagagctccgcatgtattcacagatctacgatgatttgatgttgagcacggagtagagttcttggcccgagagttcggcacatgccgggatgccgaatcagcctctaaaaattcccgccaatgaaagcgtgggtgcttatcttgacttgatgtacgggatactttccttggttgtagaccctgtggcaaagagtttagttttcccgccccatgcgttctgcattgtcgtgtggaaccgggtgtgacattcccggagaatggggaatccactggacgatgcggagagaatagcagaagtacggatcctgaatagttatgtatgttgtataggtagattgctatgcgaaacatctatgttgtacgaagaaactgtacactgccaaagaatcatttctatcagcaattgatctctgaactctacatattttgccgtctggggccatccttggtcaatacgaaacagttcaagagataatccctcgcatgtcaaagaatgtatgtatccatggatacgatgtagaattgtaagataagggaaatggcagctgtgattggttggcgcaacacgagacttgagccccggtgataagagatcaaacctccaagggttcaaccacttcacgttgcacatggtaatatcctagttaaaaggaaactcatatatccaacacaccgggtcagctttccatgggtcactatgcagacacgaactggacgcattcgacaaacggattaagcgacagaaaagcatgtactggcccgagaatgataagcaaatggctgtgattggctgctctccaacctcatatctacagccagtcgttgcgggcccgtccaatttcgattcctagtattctcttctgtcagtgaaatgactccaatctatttatcactttgctacaacgtaagttggacctgcatgacccctgcttatcggagggtcaatgcatcgcgtttgagatgttcttcgcaagggaaaaggcagagatgtcgagaaacaaacaagtagttacactgcagagtaaacatggcaaaagcacatacccatagtccgtccgcagtgcaatgtccgagtatagctgaaggatgccaacgcaaggacccgtaattccccggtctgcgtccatggagtgtataccagatcccgccataaacccggcatggctgaaattggggcgggcttggccacctgctatcggtcaatcaaatgaatcatatcataaatgagaatgaccagcttccactatcggaactaagatcgatggtctggtagacttctagcgtcggatggtggagtcatccttagtttttctgggacgctgccagttatttaattaccagtgtttgtccttgcagggtagacatatcacttttctctcctttcactttcacagcccggtgcgtgaaagtattttctatttcttcttctccacctctcacaacgcaggagatctgtattcagttctactgagactgtcgttcgccccctatcacacttgaaataaaattggcctcgcctaggtctcactatggctgaatatccggttgcgtacaatggcaccaccgacactggtggtgactcgcttcatgatgacttgaacatctactacagtgtatgttgtataccccataggagtcaattgagacgcgtgctaactaaagtgtggatagtctggtgatatctcatgggtcattgtatccacagccctagtgttgctgatgattcctggagttgggtatgacttgacccatcccttcctacaccaaagggctttcactcatcactcgattatagattcttctactccggtctagctcgtcgcaagtcagcactctcgctgatatggctctcgatcatgtcggtcggtgtggtttcattccaatggttcttctggggttattcactggccttctcccactcagccggtacctacatcggtaacctcgataacttcggcttcaagggtgttctcgccgcgccatctgtgggaagtgacaaggttcccgatctcctgttcgccatcttccagggcatgttcgccgctattacgtgagtcactcatgcatccatcatggagatactcggaacatcaattgacggtttcttcttagtgttgctcttgctgtcggcgcagtcgctgagcgtggtcgcatgctcccctgcattatcttcatgttcatctggaccactatcatctacgaccccatcgcctgctggacatggaactcgtcgggatgggtgttcaagctcggaggtcttgacttcgctggtggtacccccgtgcacattgcttccggatctgccgcgctcgcctactccctgatgctgggcaagcgtcgtggccacggaacccacgagctcaactaccgccctcacaatgtcacccacgttgtcatcggcaccgtgttcctgtgggtcggctggttcggattcaacgccggctctgctctctctgccaacctgcgtgcggttatggctgccgttgtcactaacctggctgcctccgttggaggtgtgacctggtgtttgatggactacagactggaacgcaagtggtcgaccgtcggtttctgctctggtgtcattgctggtcttgttgccatcacccccggctctggattcgtcactccctgggctgctttcatcttcggtgtggttggtgccattgcatgcaactacgctactaagctcaagttcctccttggagttgatgacgctctcgatatctttgccgtccacggtgtcggtggtctggttggaaacctcctgactggcattttcgctgcgtgagtgaacctacttcctgacagtatagtctgatcataaactaacttccattatagtgattacattgcgcatctggatggtgtcactgagatcgatggcggctggatcaaccatcactatatccagctgggataccagcttgccgactcggtcaccggaatggcatacgccttcttcggaacctgtatcattctcttcatcatgaacctcatcccgggtcttagcttgcgcgcacccgaggaagatgagatcatgggtattgacgacgccgaaattggcgagtttgccgtaagtttcattattcctaagtcggccacaacgcgttctaacattttactctatagtacgattacgtcgagatccgccgtgatgttgtcgatggcgttgagagctcagaaactgcctccaagcgcactactacacccaccggcgagattgacaccaaggcttagatcagacttgatctgacggctgttctttctttaatattaatatgaggcaactgccttccttcccttctttcttcccttctttcctttcacgttaatacttctttttttcggcgatggcagagtgtcttcaatatctattaccgaactatagatatttgggatactctccggagaccaactttcactttgatagcattcagatacccaaatatcaaattccattcaaccattccgggcagcaaatcaagttaatagagtaggcaaagcgtgacaatgtccatagtagtgcatgagtaatatttgagacaaccccagacaaagaagtaaccgtgagtggcatgccattgaatatgagaatcctatactttagccaatgatgtactcttacgtcgtatactccgcatgttgtagagagctagaacgcgggatccacccatgtgcacctgccggagcgccgcgccgagaaacacggcgaccggcgaccgtgtactgaatgcgggcaatcatcgcaaaccctccacgctcctcgcaaccctctgggcacattttctcttccttttattcatctctcccatcttccgaatagtttgcccatcgattgtttcatcaaaatgtcctttccgaccgacgtggcggagtttgatagtgacccgcgcatctcgttctcgagaccggacaacagcttcctacttgagaccaaggatggtcgcgagttcttgttcaataccatcctgaagagatgggtcgaatcggtatgtcatacacgtattggcacgctggcgctttgcgctgggctgttcgccgacaatccccgctaacctggcttgcgactctagatcgacgagaagctcatccgccagcagcaaggatacggtcccgaagaccccgagagtgagatcgttcatccccgcgatcgtaagaagcgaaagcagtcgcaggagccggtaagtgttctggtcatttatgccaacttggtcgcattgaaactgacttctttcgtctgctagaccgatgagcccaaggtcaagaaacctcgcgtcaacaccgctgtgtgggttacaaatatccccaccgacgctaccttctccgagattcacgagtcgttcaagaaatatggcatccttgcggaggaacttgacactggaaagccgcgcattgtaatgtacaacgacgaaaacggcaatttcaatggcgaggctttggtcgtgtacttccggcctgagtcagtcaccctcgcgattcagctgctcgacgagacggacttccgactgggtgtccccaacccatgtggactgatgcgcgtccaggaggccgacttttcgtacaagcgtgaacaggaagcggagcccaaggttctgactaccaaagagaaaaagaagctgaaggagcgagcagatcggttgaataagtatgtttgttgatcatggcagtagagtgtttcatactgactcgactgtgataggaaactttccgactggggtgatgatgaggctgagcttgccgccaaagccagacaggctgccgaggaggcgcgcaaacatgtggttttgaagcatatgttcacactggaggagcttgaggtttgacacacctcttccaaagttgccttgcgcgaatatggaacccagctgacctgtaattataggaggatccactcgccactattgagatccacgaggacattaccagcgaatgcgctaagattggaccggtgctcaaggtcatggtctgggacggggaggctgatggtgttgcgaccgtccgatttgtgtccgcagccgacgctcgtcgctgtgcccaggtaggaatctcagtttgaatcaatgtgattgcaaatactgaccatcttctagagcatggacgggcgtatcttctcaaagagaactattgttgcttacatctggaatggcgaggagaagttcaagaagcaccgtccccgacgcgacaaaaaacccgaggattcagacgatgagaatgagcgccttgagcggtacggagattggctcgaaagcggtggaaacaagacaagcaagaaccaggaaaccgaaaatgagaaggccgacaaggacgagaccgacaagagccaggagaccaataacgagaaggctgacaagaacgaggctgacaagagcctggaaactggtaatgagaaggtcgacctggatgagaccgacaagagccaggaaatcgacaagaactagctcaaccgaacagaaaacagcgcaagcaattccaccgaaggagcccagaacggtgggaactctgtaccaactgagctaatttcaaacaacgagtgctactgaggggcaagcgaatacttccaagtgaaaggaaagccacgcccaactgaacgatatccaaacgacgagagctactgagaggcgcgcgagtacttccacgtggagggaatgcggcgcccattgaacgaatacccaacatgtatcatatttttcccaattgaaaccattgaaatattattgtactatcttatgtagttgtagttgtagtgaagttagtgtatatagacatagcaaccgaaataggaagtacaagatcacgcgccaaagaaacgcaaatatggttcgcacctccccgagtcccgtgatgcggctatacccaatcgggccccctccccctgaagttcagttgttgacttgttgatcccacacacaccgctcaactggccctcttgctttctcttcttccccatcctctctgacttgtcaccggtcatcctttttatttccatctcttttctaataccttcaaaatgcgtgagattgtatgttatccccatccagacgcgtctttgttttcatatggcccctgagccacgaccccactctgaacagatctttgctaacatgctctaggttcacctccaaaccggccaatgtgtaagttcgacatggaacattcctagaaacattcttcggctcgtgggactaaactggaattgggttatagggtaaccaaattggtgccgctttctggtaagtgccgagcctttttttcgcgttgggtaccaattgacaaattactaactacattacaggcaaaccatttctggagagcacggtctcgatggcgatggacagtaagtctaaagatgatgggctttccggtggttcacatgtctaatatcttgctaggtacaatggaacctccgacctccagctcgagcgtatgaacgtctacttcaaccatgtgagtaccgcgactgggcattgattaagcgtgcaccatctgatcggatgttttttcttaatctaggccagcggtgacaagtacgttccccgtgccgttctggtcgatttggagcccggtaccatggacgccgtccgctctggtcctttcggcaagcttttccgccccgataacttcgtcttcggtcagtccggtgctggtaacaactgggccaagggtcactacaccgagggtgccgagcttgttgaccaggttctcgatgtcgtccgtcgcgaggccgagggttgcgactgcctccaaggtttccagatcacccactctctcggtggtggtaccggtgccggtatgggtacactcctgatctccaagatccgtgaggagttccccgaccgtatgatggccactttctccgtcgtcccctcccccaaggtctccgacaccgttgttgagccttacaacgccaccctgtccgttcaccagcttgttgagcactctgatgagactttctgtatcgataacgaggtatgaagtgcgtcggaaatgctgacatgaagaatactgacaattctaggctctctacgatatctgcatgcgtaccctcaagctctcccagccttcttacggtgaccttaaccaccttgtctctgccgtcatgtccggcgtgaccacctccctccgtttccccggtcagctcaactccgatctccgcaagctcgccgtcaacatggttcctttccctcgtctgcacttcttcatggtcggcttcgctcccctgaccagccgtggcggccagtcttaccgccaggtcagcgtccccgagttgacccagcagatgttcgaccccaagaacatgatggctgcttccgacttccgtaacggccgttacctcacttgctcagctttgttccgcggtaagatctccatgaaggaggttgaggatcagatgcgcaacatccagagcaagaaccagagctacttcgttgagtggatccccaacaacgtccagaccgctctgtgctccgttcccccccgtggcctcaagatgtcttccacctttgtcggtaactctacctccatccaggagctcttcaagcgtgtcggcgaccagttcactgccatgttccgtcgcaaggctttcttgcattggtacactggtgagggtatggacgagatggagttcactgaggctgagagcaacatgaacgatcttgtctccgagtaccagcagtaccaggaggcctccgtctccgaaggcgaggaggagtagtaaggattccccacatcatccggctttcgaacataacgactaacgaatttccccctatttttagcctcgctgaggacattgttgacgaggaggtttaaataaatctcctttgagatttgttcaaagtaatacccttgtgaagcctacattctctaccattcggaccggctttgtgggcgtaagccgcgaacccaatttgtttgagcgctcctaatttacacccttttttgtctattttcctacttggcttgggtgatttgttcgacccctccagaatagcacatagtggaaatgactttcaatagcttttttaatcatgttaattgtagtgaaggattggtgcggcagaagttcatatgggccagtatactagagttcataacttcaaagactatgtcgtggcaatctcacataaaaatgacgctaagtacacctcgtcacaaccgatccctgcctttctttctacagttcaatggaagggacatttcccagtccgatactccttgaactccaccagagtctcctctaactgcttcctccccttcccctcgaaatacttcggtccaatatccgcaacactatatccagtgggataatacttatccccctcgtcacctggcacagcccgccctatagcccgcgtcagcaatgccatcgggccccagcggttccagaatgtgggcttgacatagtacggcgcagcctcccactcggtaaggaagaagcggtcgttctcatccggctcctcagtggacgaagcgaagcgcatgaagtacggtcgtggcagagagaggtagcggaggaatagcctgcgggctgtgaagatggttgagagaagtgctgtgcagaatgcggaggggggttcgtagctgtttagtcagtagttagaggttagttgcgacctgaacatgcaaaccaaaaccaagaaagaaagaaacttacaacatcgccttcctaagcctatcgtccatcataaacgaaacagcctgcaacccagccggatgaaagaccttaggtagcatataaagcaggacagcagtagtctgatccgccgtctcacgattcttaatatcaggcaccatgcatctcacctcatactcatcagcccaagcagtcaactcctcgagccactgaatcccatcctggaacccgactttaccagacggcagtttctcatagctaatatccagcgcatcaccggcactcttccagaatgtcccgatagcgcatcgctccaggtcactcagcttacgccactcatagcgatcgatgaagcgaatcggctgcagcgcgaacagcgccagcgtaaagagcatatcgtcatcgaggatcttaccagaggccctgtacccgctgtgcaggtagcgcgtccgggcaagaccgagacatgcgcgcatggaagtcgggttgttgccgacccattcttgcacgaggaggctggtatctgtgtagcgcttcagggaggtatccgggttggagaattgggttgtttttgcgaggaggcgggatattgaggggatcccgtatgtcttttttatagttagaaaatgcatgtgtggatcggtagatcatgacccggattgtgagtgtttgcccatgtgggtgggttggtaactggtcttgtttcatacccggaataacgcgaattgtaagctcttgatgaatatgaatgggaattcgagctgcgcgacttgtttttggatctggaaggcttcttcgtcggtcattttggacattgactcccgtgttggataggcatattgtttgtggagcttgcgcaggcgttggaatcggaggcttgttgttactaccggccaggcgatgaggaggcctacggcgtaggggagtagttgggttgtcataccccctgcttgtagtgaagccagggcatcggtgtaattcatattgacgtgctggtttggggatggcaccacgacagggttttccacgaggttcaaataagaaagtggtggtgacgaggtccacggcactggcccatttacgttccccacaaggtttatgtactattttcttatcatcgtaccccgcgtatgtcagcacaacatatataactaactagagaagcatgtagtaaatatatgtatttactttctaatgtagagattgtaattgggcagtttcaaacgtggggccgaacacattcctgcgttatctaacaggtgcttaagccacagtatatatacatcgcacatgtatgtcacgggtcggaagcactttggcgacgatcagaagcttaaggtcaatataactttgctttgcatcatttaaacctttattgaagttcacatcaggtctttacagttcccatgttatggctatatactctctggtttatgttgggaggatatacaatgctctgcccccacactttctggcagatcattatgccaacacataaaaagagtgacacacactagcgaccaatcaatttgagctcgaaagcccgcaacggtgggaaaaacagcatagtgaagcccgcacccaaccagagacccagatcagctccgccagccatctgcgcaatggggccgatataatacgcctgagactaaactgacgtattagcaagacgcagttaactggattgggagtataaagtcttaccatgccgacaattgcaccagcccaaccgataaggaaagcaactcctgctgcaatccccaacggcaatttatcgcgacagttccactgagaccagtcatagcctctatttcgacggaaaatcatgtgttcctcgaagacaatcacaacgaacatcatgacccagtatccaatcagaggcaggaaagacttgaacacctcgtacagctggtcccggcctcccatcgcacatgcagcatagataaccgtagcgagagtcgtccagaccggtcggtgaacctttccaaatatcccgccaatcatctggaggttcattcccatcgagtacgccccgggagtgttattagcaaccaaggcgaggacattgataacagcacagaatttcccgaaccccccgagaccgtcgtatgctgtcatcagcacgcctccgggactgctgccgtacttggccgcaagatgtgccgagctggcgataacggttccgagtccgatgcccatgaggaaaacaatcgacatggcactagtggcggcgaagactgtggctaggaatatccgggagctcttcatctgcggcgggagatagacatagtaatcggcggcgagcggggcccaggcgagaggaatggacaaggccagggagaagaaggtaagtcttttggccattagttgctctgtcgacattggtgtctggatgttgaagtcgaaatttggccctgctgagcccaccatcacgcatatcaccagcagctgtggcaaccaggcaactctggtattaattagaatatgcattgaagatatcctgggctgccaacacttaccgctcatataattggaagattttcatcccaaacagagccataacccagctggaaacggcgatgatgataatgcccactatcacggaaagatgcccaccagagaccacggacaaaatctggccaccgacgacgctgtttaccatactgtacccgatattggtgaagaggtttaggataatgcaaactttgctggggtaataacccatgaaatatcgggccacgatctatcaagtgcatgagcatccgttcttataaagtaccttctttcccttgtgtcgtgaatcaccgatatttcaatacgtaccaaagtcctgtttccgctcttcggtccccatatacttataaagccaaccgtgaaattgccggctaaacatccaaatacagcacagagggccgcatccctgtagctgaggcctaagacgagcgtacccattgatccaacaatgatattatttgtagccaatgtcatgctaaaccacattaacagcatatgaagtatggttgaaggcgttattggctctcgtttgttgataggaacgggctcgattccgctgctctccacatttttcaagcttgcaatccatcgttgccatcttgattgcggcacgaggtcaggcttttcgacggagtcattagagaagctattcgaggcggttttgtcgaggtaagactggctcggacactcgagagtactcgagctgtcggctttttcgatatcttcgagcttcattatcggatatctcgatgtgtaagtggcttgtaaggattaagctgttcgtaaacaaaagccttcgattcaaatccaccactagacagataaatgccaaagagtctggcgtatagataggatgtcgtagatccacagctgtacaacggtcataaaataggagggaaatcggtagttcgtatgaaatatgacggaggggggagagctatggaatgatagatataaggggaaaaatatccagccagtgcaccatcgtaaggccgttaaacactgacatcaccctgtctacctagtgaaacggtgtaacgacccgagggggaattaaatacataagcattccttagcaatcaaggtaccaaccgagcagcttgcataagtgtccaatgatgagcactagatttgcattaccgcaatacagtcgggaaggaacacgcccagcagattgtagatcatctatcgccttgtagagagaaaagaactacccagctttatcccaaagtggaaggggcttcatcgtgctgtgcaatattgaccatccacaaggacacccaccaacacacatattcggtggattggtaaccatctcatgataccatcaagggaagggataggcgcatgacagccacacgatgaaataaaagtcccgccggcccctgtgatccgcgatacatttcctgtatggggtaagtggcatgctggaaagctccgaatatgcatgctctggaatgctgttgatgcaaggaatatctattagctcatgattctatacaatgctcagatttcaggaggcgggtccgaaatagaggaggaggatgatcagcccaaagctccgttgagcaagttccgcgagaaatgtagcttgtgattgatgcaggacgaatacttccccggggatctcgacgatttgctctagccctaggagaaaaaggtccgagggaaggggtacttttaaatagctctgattagttaatgtttactcctattaagtcactcataacttgacttcattactatatatagagagttcctgcggctattcggttgtcctcggtatctctcatagcccatatgagcacaagttgaagttgatacattctacagaggctaccatgaaggcgtgaatggtgttacacatcccgccatctctcacggtcttctgtattcacctcagaagacttgtacgaatgggatcccgaactatgtgatattacgtagcctgagtctttagctcaggtcatttcctacaagtccagctaagctttcctcctgtctcttctgacccacaagccggaatccgtgatacggatccgcgaaggcgaattctcctagcttgccaggcgttggcgtactgcgtgagagaaatgctgattcgtcaaaaagggcttgactttccgtaagattagattccactgctaacatggcgcgttacacccggtatacaagtgctataatatatctagtagctgtctgctagaggctttctaattcgagctgctaatatgaggacgcctagattccgggtttctaagcaattttaagagctaaggcttatagttagctacttttctggtttgaatactattatctagatattctggctttgttcgtacactaggaatgaatatatatcgtctgtcaataggaaactcgattattatatgtcgcttctttattgtggccaagagcgagattggtgtaagacgaaaatataccttgaggacataaagtattcgatttaaagatccaaaattttcaaaggaggcacaagaagggaaatgagagcagttgatctggtctttctgtcgggaaagaacagtcaagacactgagagccttgaatttacgctgtctctctgtttctcttctcgatctaccaatatgctccatcaaacgtgtctcatctcatttggttttcttcacttgatcttcctttcacctacacaatatccttgtccatactgaacttacaatggcctctgccgatccaccgtccatatttcaacccagaatacgcgatggcatcgttgtgtggattggttgttgagaggatcagctaggagcatgacttggttgtgagtctcaagagctagacgattattttaagggtacctagatttgtcatagtatcactggggcctttgatgaatggttttcttgtccattctgatcaagtagccagctgtttggattgttcgggttcggattcgggtgcggtataaaaacctgggagaatatgcgtgcaatttgtgcctcgggaatatcttccgtttatgaactagtgtattacagggtatacgactactgtggagagtggtcgatctttttctagtcctgatccactgaaaccctgcatcaccccgcgaaatcttggataaattaaagaggagaggcactcgagataggtaataggtcagatttttcagttccggagccttatatctgctacactgaatgatatcacaacagctcagtgagtatacgacagtaagtgtgtcgacaggtggactgacctatacacctcgggagtcaccgacccgatacccctggagtggagatatgcggagcagcaagcttctgatagaacaagttagaatagacctccttgcagaatccgagaaccattcgtattcgtggaaagttgagaccaacccagcttccccacaggtctgtggagagaagcggcatagcatttagcccaatgccaatccccgaggttgccccggttctaaggccgcttgtcgctgctatagataaaaagattccattccttctgtctggggttctattatatctcccttgacatagttgagagagtgcagacatcatgcggtattctctatgggcctctacgcttgtgctggcttcggctgccgccacaacaacttcactgagtgatatatgtacaagtgcatatgcgaagaaggcgttgccagtggatcaactccagggagttaccgttgatccctcttccatttccacgagtctcgtcaccaacttcactgccagcagtatattctaccctaccacgaccttcgattactgtaatgtgactttcgcctactcccatgacggcattgaaggggatattgttcatgtgcaatactggcttccagctccagcacagttcaaaaacagatatgtgtctacaggtggaggtggttggtatattaactcgggcactcaatcgatccctactggagttatcgttggcgggtacgtatttactcgtatcaatttggtggtatgaatgtctgactgacagattacataaagtgttggcggattgaccgatggaggatcaggaaacttcgatgccgcatttagttccgttgctctcttggaaaatggaactatcaattggcaagcgacgtacatgtttggtaataccttcatacttccgaaactcacagcttacgggtcagctaacataagaaacaggctaccaagcccagcacgagctcgctgtattgggcaaagcgctcacgcgaaatatttacaacgtaccgtccagcgagaagatttactcctactatcagggttgttccgagggaggccgtggcggatggagccaggtccaacggttccccgagcagttcgacggcgtagtcgccggtgccccagccttccgctgggcacagcagcaaaccaatcatttgacgggcaacgtcatcgagaaaactcttgactactacccgcccagctgtgagctcgagaagatcatgaacatgactgtcgcaagctgcgatcccctggacggcaagacggacggtattgtatcgcgctccgacttgtgtttgaagaatctaagctgggattccatcctgggcgcttcttactcgtgcgatgctgtcaccggctctgcctacgtgagcgccacacctgcgcagacaggcaatgtatctgccaaagccatcgaggtcgtcaaggccttttggaagggtcttcacgactccgacggcaagcgggtttacttcaactaccagcctggttcgactttcgacgatcttgtgagcgcatatgattctaccaccgacagctggaatctcgatataagcagtctcggcgggacgtgggttggcttatttatcgatattttgcaggagtccaacattcccagcttggatggcgtgacctacgataccctcaaggaatggatagtcctttcccaaaagaagtacggggatatactccagacaacatacccagacttatcggacttccaagccgccggtggaaaagtcatccacgtccacggagagcaagactactcgattccgaccgcttcttcagtccgttactggaactcggttagggaagttatgttccccaacaagtcatacaaggaaggtgccgccgctgtcgatgacttctaccgactgttcctcattcccggcgtgggacactgtgccaccaacgattaccaatccggtgcgccatggccacagacgactctgcagactcttattggatgggttgagaatggcacggcgccggcgacactcgctggatctggtgagattgaaataatatgtcgttggcctcttcgcccgctttggacttcaaatggcaagaagttccaatgtgtttatgaccaggaatcgattgatagctttagttatgatttggatgcgtacaagcttcctgtgtactaagaagtacctcgtcaagtgagggttgcttctatttgatgaaaacactgccagctctttcaatcaacagctggacttcaacctgttctattcaatcttttctgtgtatttttatttatccccatgccccaaaaaggtccctccttaacctcatatttgagtactccgtactagtgctagtgatatacatactccaccatggttggccaataattgaagacccgcatttcgcacaatgtggggttcgaacacccgacatgactggctgatactgcacgtgacttccgaatagcgtaggaccaattatatgtcatcataaagacccacacccgtataacctcaaaaaggacctgtaaaagaaaaaaaaataggtagcttctctttgattgagcgtgtcatccttagtgcaggggccatgctaatcttctctgtatattttcatttgaccatatgccccgaannnnnnnnnnnnnnnggtagcttctctttgattgagcgtgtcatccttagtgcaggggccatgctaatcttctctgtatattttcatatgaccatatgccccgaagggcgaagggacatccttatagttcaatataacctgcattctgggcataattataccgcctacgggtttggaattgggcaaacttgaggaaggcaggtttgtatgttaacaagtgaggaaggagtgacaatacgttcaggaaagcctaataaaagtgagactaaactacaaactagtaagagaatatgaagatcaatatactaagaaagaaatagagggaaaaaacatggtatcttcagatctttgagcattttacaatcaagtatagtaaacgaaaaagaaaaggaaaatgctagatggcaccggagcctttgcatgcgccgagatatccaaaacgagaaaggccagcctggccgccaaacccaaatgcaaatgattgtatgaagcccaaaagtacaaaagtagtctatgcttaattttcaacagcgttacgccgaatcacccatttccagacaccgaaaatagagcagcagagttgagacgagggaatataggggcataatgaattaaacatgtccccgtcgatcggggaggagagaaaggagtagaatataagaaaggcgagatggagatgaactcagacgtgcgactgactgagactcgatctcgatctcgagcgctgagacaaggaccgacggccacggctggagggcgcgcggtccggcggagcatgctcgaagaacggaatcagatctgggttctgactcgggggtgtcttggagtcaggggagtactcgttcaggatacgatcatcagcagcggtgtctgggtggatctcaatgcctggctcgcgatcaaggccgctgtgagggcccccgttggttgggaaagtgacttgttcgggctcatcgtggcctcgctcgatcggagaccatccggcaatactgccggcaacgatacctgccatggcagcggcgggtccgaatgtcgagttcgagcgcgaccgtgtgttgcgtctggaacgagactctggggtggtcggctgtgggctgccgttgtcgttttcgtggtcattgtcgccattcggtgtgggtggcgtggaggaatcacgcgagcgggagccactgcgggaccgaggaaggaattcctgagggtgctgtagcttgtggcggaggtgtcgcagacggccaccgcggacgcgcttgaggaaggcgagctggtcgcggatctcttccagagcggggttccactcgtaattgcgatcctcgtctgagatgaccaatgcgggacccttgttgcgattccagaagtgaggaataagtctcgagatgaattcatccggaataagacgaatgatcacagcgatgggtatggagattgctccgagcacaagactcacggcccactgcgagccttcgttaagacgcttgacggagaaagcagcgccaccaaagaagatgatcaagatttgacccccaataatgatgatctgaataccaatgaaccaacggtttctcaaaataccttccaaaatgttgagcttgttgtcaatacgacgggagttgtactggttgaaaatctgcataaacacgaaagtgttgaagaccacggtctgcaaatggccgctatcccaagagaaaatcttatctccggcgaaattcagaacgaaagttacaaccagctggtagatggactgtccaatgatcatcttccacattgtcagagtgatgagtggatcggatttcgactcgggtctgcggtcaagcactgtttctgtaggagggtctgtcgccaaagcgagagcggcaaacgtgtccatgatcagattgacccacagcaactgcactgcgctgagcacggagtcctcattatcactagcgactgcagagacgaaggtcagaatgacggcggtgatgttgacagtgatttggaactgaaggaacttcttcacggcgtcacagacagtgcgaccccatgccatagccttgacaatcgatgagaagttgtcatccatgagaataatgtcggaggcctctttggcaacttcggtaccagtgatacccattgcaaaaccaacatcggcattcttgagggcaggggcgtcgttagtaccatctccagtgacagcaacagtctctccaagcttcttgagttgattgaccagaatcttcttatcttccgggctagagcgggcgatgacctggagtcttgggatgatttggttcatttgacgtgtgctcagcttgcggaatttgggtccctcaatggcgataccgccaggtgtgtagataccacactcctgggcaatagccttggcggtcataatgttatcaccagtcaccattctgacaaacactccagcacgttggcaagtatacactgcctcggcaacaccggctcggacaggatcctgaataccgaagattcccaacattgccatgtccttgaagataggttcgaagactgcctgggtatcatcggtttccgaagtaggggctccacgaggtggccattgatcgaagtcacggtaaaccagcgcaatgcatctgagagaacgagtggcgtaggtggtcataatgctgtccagtgcagtcctgttctcatcggtgacaggagtctccgacagagtgtcagtggggtcttggacgatacgagtcgacttgtgggatagaatttccgcggcacccttaactagcattcggtattttccattctccagctgcgtcacgactgccatgcatttgcggccagaatcgaacgggaacatctggacgaccttgccatttgctctcgcttcgccaaggggccccaatccaaggtaatccctagcgaaagtcaagagagcagtctctgtcttggatccgacgtacgtcttgactccatctgtctcaccttcaaatgcggttgagttgtagacaatggacttgaggaggacatccttcaccgacggtgatagggaagagacaaaatccgagggagtgatttcactctgatcatcgctcgagacaccagaatacttgccgaaccgagacgtggtacccaacgtcgcagccactgcagtcattttattctccgtcaaggttccagttttgtccgagcaaatcgtggtagcgttacccatagtctcgcaggctttgaggtagcgaaccaagttgttgtctttgagcattcgggttgtagcaaaggcgagagcgagcgtgacggccagtggtaggccttcgggtaccgcgacgacgacaattgtgacagcaacaatgaaaatctgcaggaatgcttgacccttggcgtccggaccacccgcgatgtccttaagacgaaccaaaaatttgatgaagagaaccacaaacagcaacaaaccagaagcgaggccgagcttggcaatgtactcggccaacttgttgagcttcgtctgcaaaggcgttgtttcgccctcctcttggagggacatcatcgtccggccgagggttgcgtgtgtaccggtagcagtgaccacgaacgtgccgacgccctcggagaccttggcaccagaaatgatgaaaggatccatcttcttcaggtcttcgttttgttccattgttttatacacttcatcgccgggggttttgcggagaacgtcagactcgccagtggccgaagattcgtcgcatttgaggtcgtaaccatcgatcaagatcccatcaactgggaccatatcaccgggttccaaaaacatcacatcgccaaccaagacgtcgtggacagaaatttcctcggttcggccggatcgttttaccttgacctgtcgattctctttctttttgttgagttttgcgaactgttgttccttttgccagtcattggctgcaccgaccaccaccacgataataatggccacgagaatggccaaaccttcgacccactcgacgccaggttcgtcgggatttgctgggtggagcgattgcggaattcccacagcaagtgaaactatagccgcaatggtcaataagatcaacaccttgtcgttgtaggcaatccatgccagctcccagatcgtcttcaatttcctctctggaagcctattatcgccgtagatacgtctgcgatcgacgaaattctctccgttgtgctgcgttatgacggaaccctcggtcgtgggtggcggtggtttagtcggagaggcagacttgggcatgttggttcccgaggcaggtgtggtgggtgtgaccacctcgtcaaagctgacagttccgtccaggtttgtctcatccacactcaagccactttttatatcagtccggagccctttttccagtcctcgcaggcctcccaacgcatggaaggcgccaaagctcttcggattgagaagcttgttcagctgaccaggggaaaaggcaaacttgttatcctcgacctcaaactcgtcttcgcggccggggtctggggacaggggatcctcatcgtgaacgccgtttgtggcgggacttttaggcgaatcggatgcggattcctgagatgatgagggcacatatgtgtcgccgccgtaggtgctcgatgtttggttggtctcctccgactccaacgagttgcctctcgagcgtgttccagggacggaaaggaagttggaatgtgtctcggccgccttcgtcttgggcgatgagatgttgtgaggtgaggttggccggctctctcggtcccgagcttcggaggatgcattggagcgaattgatgctgtggaatgcatatccgtagaagaggcactgccattgcgactgccattgcttagcagtgcggttgtatcgggggcatgtgcgttatcagtgtacatccgtgatcctcccgagcggatttgtaaaggcgtgtattcgttatccggggggttcacggccgaggtgtcgatagtaatagtcggcgcgcgctccctgcgcagggttgacgattggccgggctcatcttttgagcgtgggtcggacattatgggagtgtctattcaaggcgcgattcacgcgttggcacccgggtttgtatatggggtcatatggatcaggaggaataagtgtccagagaatgataataactccctaaactcctaaactcctaaactgtccagggttgaagatgaggtaagggtgggaaaagtgtgaaagtgtaaaaacaagcttggaagataggaggcaagcccaggtaataatcgcccccggacagacgtcaagtcaaacctctatccactccggtcgagaacttcctaatgcaattgatttactttcgttactccgtacggagtattggctttcttcttttttcttaacttctccactttgggggggagacccgctagcacagcccctactgtgattctgcagatgcgatgtagatatgtgatgtaccctacttgatatatgacctggacgtgctattgttcattgataagaaggcaggggaattctccatgacagtgagaatatttccaggacatttccatgggtaatcggattatgaaggagcaaataccgcagcgatgcaccaataccaagctatatagcgtctgcactgcctcatttgccaagacatgaaaacatgcccgaaatcccgattcggcaaattaggggggacggcgaaaataaaagaaaagaattcaaggcacgaacttggagaatctgcataactggagatcgagtgggaattaaaggaacagcatcgtacattaaagcccaaacatccctttatgtccgagctagttgtcttttaatatgcccttgccaaagtggtgacgtctcctatttatatgatcgacgtggactccgtaccggcacggagtccgactgtagcaggtccaagacttgttttcttttgttttgattgctgtacaatataaaatcaaactctgattcccggaacttgacggaccagatctccctaactggtttggccaagtacggacataacccgctattacagctcacaccacatacgccacactcagaccattgatccttgcatcgtacggcatatcaattgactactctgtatggagtctctgtatggagtctctgtatggagtatgaactatgaagtatggagtacgatgtactagattagctcgaggtacaaagcttagaactgtcacatggacataaagtaggtgtagctctgtaaatccgaatccggcatatagctacggagtacattatacaatatatacttcaataatttcccgtctccgagtaacacatagaacacatagttcagcaaaagataacaccgaatcagaaacccctaaaacaagccaaaccaacaattccaatcccaattccaatgccaacattcgccacctctcaaaccacaaaacccaatcaaacccagaagcctcaaaagttgggaaacatcccaaccaacaaatacggcctcaccgccgtcttgcccttacaacatgtacccagcaccaacctccccccacccgaccccatttaatatttccagtctccgcaaccccaatcgcagaaaccccactagcacaacgcatcaacgcccatacccatgcacgcacgcaccacccgaacagacataccactcacgagcatcccaattcaggctcgcaatcaaacgccaccggttcccgtttgaatcctgggtacttcgacgataagacattcctcctcgctggcttgttgcatgatattcggaccgccgaggctaatatcaccaggctgggctttgagtacctccgcggcgtgttggcattgcgtgtcttgcagaatggtacagagtccatcatagctccggtgcggtgatggccccgtgttaatgaatgggtgagtaaagcggacgctgtcattcgatactaggatttgtctctggtttgtaatatcatggctgtgggacggttgctgcagctagtacggagtaccgatctcggtatataaattcttgatgtttataggttgatgtttataactatctgtgagtatgtcaattctcatatctatgttaggtttcgaagcattgacctcactttatcttgaactttgacttgactttgaatctctgaatgttgtacgagatgtttctcaaacctaatttcctctgatatattgttgacaaacgatgttgatgcattcgtagatgtcctatcgacatgtagttgtagaaaaatgaagtaacctgtcccccttccatgttcgatccagtttccttcgtatcaagcctcgccgttaaaagactaaaaccactcaaatcccatgctaatgtacacagaacaaatcgccgctagatctactgctcccggtttacggacgacacgatcccaagtctcttcttttcttcttcggagatcgtcacatcccagatcttcaattcctggcccttttcgaaggtgttgtggtccattggggacttgcgctggctggagtcccggataaccaaggccttgctcgataaagcgagcgcgtccacaagctcggccatgcgtcgggactttgtaaaggcacgagtgatgtgctcgtagtttgcaacccagatagacacaatcatgcaggatgtcaataggtcgtgccgctcgagggcgtgactggcgtagtacaacgcgttatgccaatcgagaatcagctctggaatgtaggtcgtccgaatgtgttcgaagtctttttcttcctcggctatagaaccaattagtcttgagattccaatgccgtaacatcaagtacataccatcggtagatatgggtagccagtcttcggcgaccactgctccaacccattcctctagaatactgacgcattcgttcatgtcttgacccatgttctgcaaggtacccgagtcacgtcgacgtttggtcctaaattgattagctttggcaatgagatgaatagggaagggaaaactcacttggacatctgctcgtgcaccagtgcgaattgctccacggcatcaaacccaagagccagactctccagatctagaactctatgagccctgtagtatgccgaaactagtgcaacgttgttggagccggaaagacttgcggaaagacttcgccggtggagactgtttctctttgatttagtggggctagttggtgtagttgcctcggtctgtagcccttcttgtggaggcatggaaatgatgtcggatccgaatttgtcaatcgagatatcagccaaccgaatacggaaactcaactcgcgagcagcggcaagcttatcagcaactagtaaagtcagttcggttggattcaaacactaggaggaacaacaacatacggaagaacttgcgatacagccaggatccaagatcgcaaatcttatcccactgtccatctatgtagcgaagccactccagactgcgaatcatcctgtcatcttccggagcgacagagttcccaatcaagtcggtcttgggtgacactaatgtccgggaaccgtcaggtcgtcgcagcaccctcgaatagccagtgactcctctagaatgttcaatcgcagggacatgttctttcacccacgcccattgaacatcaagaacagtttccatgttaatatgatgtttccgtgcgagtcgaacttgttgtatcttctcttgtgggtcaacgatttcaataagaatcttagctagaatttcgtgtcccatctgtgcggggaggagagagacgtaaagtgggacaaggtggaatagacccctgtcttccaggttggcgatatgcccagccacgatcactgacgccgtttcaacgaaatgggaatccacgcgggcgtatcccctttcactagccacaacgtagacatgagctgcaatcctgagagcttcttcgtcatcggcagctatgaggaaagattcatctactggcttgcgcacaatctctggaatcacagaggtattcccgtatttatcggcgctgacttgagatacagcctgagcaagagcagtgaagaatgtatcgtagcctttgctaagaatcgtggcctggatgttgcggaacggattacgcgcttcgccgctaacccggtcgttgcccttgagatatacaaggaacttttgaagttctgcgtgcccagctggttccggcttgaatgccacaggggtattgggggagtggctgagtttccgctggaattgtttgcagaatccctggtagcgtgagagcacgacacggttgaagtacacgtaaaggaagtcgtcccagctccggcagacgctggctgcagcatcggtttcgccacaaagcagggcgtaaactgctcgttgaaattcatcggtattggggtcgcgtgttagcgcagagcaagcggtgcgccatgcatcttgggctcgactgttcatcaaacgcgtgtggccatcgtcagatgggtatcgagtacttgccgacttgggatccacactagagccgcacatgctgacggccctccatccttccagacgactctctgcccattcgcgaatcttagtccagttttcgccctgtctgagcatcttccagcatgttatccaggtggcgcgctcgaagaattcgtcctccttctctaaaccgtgcttctgacgagtgagagcatcgggatcgagctgagtgactagcggtttttgatcgcctttgctcagaagcgagcgcgagatgcccgggtcattgggttcgaggggctgtggccaggcgcgcagacgtttgtgacccttgatcgattctttggtataaagccaaccggttgtccacaacccttggccccttcgcgattgttcttccatttctgtgatcagggtgtcaaactgctggctttcggtcttagatgtctcttccaaccatcgcattgcaaccacgcactcaaggccatattggtcagcattaaggaactcttcccacatctcgcgatcggttgagtagcggtgaaggttctggaaagctgtctgtcgtcctgccttgtaactagcccggctagaggggtcgtcaatgctgatcaggttgagcaggaggcgccaagtgtcggcctcaagttgcaaccgccgtatctcctcgtagcttttgtgctcttgcgacccgcttgatcggaagcctgtctttgtccggtccacgatttgttgtgtctggatttccttgatcgcattgttcgcaatgtcgcgatagctctgtacaagcttgtaagctgcctgggcactgttgaaatcgtcggttgaattggcgcgcttgaactgatccagcttatcggcgaatgcttcgatctggcgagtgacgcggtccgctgtccggcgaagggggtgcagcgcctcctgggcgcctgccgcggtgaacagcggggtgtctgggacagagtttagtaaatgcgatctagacatagatcttgagctaaccttgagatttgcccgacacgccaaagacagacggctcatcagaaacatcggacccggtgtccgatacggtgtcgccctctgtatctccgtccatgtcctcatcttggtcttccgattggtcttccgactgatcttccgattgatcttctgattcttgttcctcatcctccaattcttcatcgtcatcgaaagattgttgcgaatcatcgtcaatagtgatgacctcagtttggcgctgggcaacctacacaaaggattagtacataaacaaatagccaagatcaaggataacgaactcaccggtgtgaatgacccggcggccgatcgagttaaaggcgccatgatgggagacttggttagaagggaggagagaggagctctgtggaataagttgtgtttgtctcttttggttttcgtgactgactaacccgaacgggactagcggcaacccccgaagctatttcaacgaattttcgcccgcgcacttctcttcttcttttcttttcttctctaatgtctataggctttcattagagtctcggtatgaaaactcaattttcgtacaggtccatgaggcctctttgcgtgctcacgattgtcttataataaatgcagttcttcaattagcctggtttcctccatatggaaactcagaccgcaaaggaattgtgacatcctccatcttcaacatgggtcacttgaaattgaaatttaaagaagcaaacgtaatagccttactactttacttccctgctgcctgagctcgttgcttcatcttcaacttcagcaagtttgctttcgggcagctgacggtagacgcttggtcaccttgctgttggtagaaggcattgcagcactcatataaagcatcaatttgtgcctggcatctgtcctcattgaaggagtttttctgcaagcagtctagcttggttagacctttgtgtcaacatgccatgaattggaaaaataccttgaatggcgcactgttagagagtcagtaagagctagtaacaccatccaggcactctaaatggacgctttcagatatgggcacatacagcacgcggatggcagggttgatcgtgcgacagatcttgctttaaattaccctaaaagaatctcagcatctagccaatatgtccacagtgatacttttcataccataatgcaagtatcaaagactgtactccgtacaaagcgttgtagatactgttccttggaagtgacgaaagtgatagaagagccaaacgcaaaatagattctccgccttcagaccgtggggcgagtgtgctattctgccgtcgccgctgatctctcttcttcctctcttttctaaccaccctttccacaaccttcactatcgcgcttctgggctttcgtcgtctaggtgagtaccccgtacttcagttgtgccctaaaattgcgttgaaatcgcatctaaccctcctttttgaactcttcagacataattcaaagccccgctcaaagaggtttctaaactcgctctcgctcctatcattgtaagcattcttcctcattgacattctggcttcataagaagtagccgttgaacgaaatccagactccgacagttattcatcatgtccgacaaagaaggcgctgctcctcccaccgagcacctgaacatcaaggtgaccgataacaacaacgaggtgttctttaagattaagcgcacaacgcagctgaaaaagctcatggacgccttctgcgagcgccagggcaagcaaatgtccactgttcggttccttttcgacggcaccagggttcgccccgaagattctcccgacactgtacggccattcccttctttcgtcatttattagtatctcgaaatcttgaaactaacttcaaatagctcgatatggcagatggtgataccttggaggtgcaccaagagcaaatcggaggaggttgctagacaacaagccttgtatgctagattcgcacttcccgacggaaccgaggctactggagcgacatacgttgggggatacgctagggctgctggctagcggtggacagaggatcctcattgacggcccatgggcgaagcggcggcgttcatactgctttttttcttatgaatgatgattatcaaaagcccttcagtcttctctgcagactttgagggtgctttcgctatgttatgttttcctcgaggtcgaccgaccgcatcgcgtagacataggtagtctcattttggtccgaggctttgtatttgaacctggaagcgagaaaccaggacttgtgccaaattatgaagactttcttctggggggggcctgtttcatccgttagtttaggtggtttatggggtctcaatttagactgcgcatacacttactaggccctgctatcaccagtgatcgccttataacgcggttaccaggcaatcgaatctagggcccaagaaccgcggagttgtccccccatgatcagttgatcgaccacatgtgttcttcgtgggatagaaagtgcaagataaccacacacaaagcaataaagagacgcccattcatcgcccatggtaatctgtcacacagagagaagacataaacaatccaattcaacaaatatacacatgcatagagagcaaatcgcctaatataaccccagaaatgcaccctaaagcgatctaactgctccaaatagaagccttcatcttctcctcctcctccttagccttagccttctcttcacgctctcgattccgcctccggatttcctgctccttaatcgagcggtcataagcgcgctgctgctctgtccgcttcggggcgcggatccccaacgcaccggcaatcaaccgctccgcaacggcagtctgcttctccggtcgacgggtcggggggcccttcgccgaagcaggagaagcagctctcgccgtccacgggttggaggtctgcggggagataggtgtcggcgggggacccagcggtccctcagcgctgatgcttggagagagcagctgggaagcgtattcgtcgcgggattcggcttcctcgctttccgaggcagagaggtctgcttcgtcttcccaggagtctgcgacgggtttgcggtgtattttagggttggacttgggctttgaggtcacggctgctgctggaagttttttcacgtttggtcgggagatgtctcgcaccgggcccttttcgcctatggacaggttgcggagtgtggattcgagttcggcgctggcgctggcgcttggatcagacattggcacgtgaggttcgggtgtaacgggcgataaatatacaaagagtgtagtggtaatggtcaacgagagtatttaatacacagtccaatttaaggaagatttgtgcaggctcgaaatagaacgaatggcgtcagtgccggtggcatccctggtcgatcgtggagaacaaagaagggctagacctttcgggttcggctgcctcaggatagtcaggcatcaatagagtcttttttctatttatatttcagggatagtagatcagttatattggattcgtaatgtctttggtggatttatcaagtacataatgctaacattcagcccctgacgttggaaacatccgaagctagcaaaagaaaccgacttatagatcatctaggagcatcaaactattgcaacctgcatcagaagaagttatagggtagtaggagtaataaagtgcacaataaacattgaagaagtgactagcatcattctagatacttcgatattctatctgccaatagatcctttctactcccatgtaccaaccatcttcgttctttcccaaaactgcacccgagcaaagtcactaaagtgaggccgttactcaagaaacgggtctggtgaaaagaagctggggttttccaagatcatatcaacgataccatcgggtcgtggccgagtactccccggtataacataacaaagaagtttgggacgtacggctgtaatgctaaaacgaggatctgagcacacccaatggactaggctataaaagaagaaagaaaatcacgataagctcggttgaaggtctctgcagtgtagtgttcaggtatacctcaactggcatctggcgggttgtgaataggaagtttaatagagtaatgagaatataacaacctactgacttcgagtgttttggaatttgactcgtaaattcaatgaaggtcaccgaccatggcttccatgcaaagccgatctgtggccgaaaaatttcggcaacagcggtctctcaaagaaaaatatatccaagaatgatgcatgtaaatctatgtctatatatatctttctttgacacacagtaacatcgagagagtaaagaaggtagtttttcttcgtgacatctatacggagtatctccgatcatatcaattgtcctctatgctagaatcatggttgaaatccgcgctgcagccaaatgtacggaggtgactcctcaatgtccagtcgagggcaccatctacggctacgcacctgatcttgtattcagcgttgagttctgtttgatattcggtgcttgttctctgatacaactcggccagatgatcagatggcggctttggtcttttagtattgccgtgattctcggttcttcgactgaagtgattggtaagtcaaattgaaactctatgagaatcactggagactgcccgggagaatactgataaaagaaacaggctattttggtcgtatattgttgaaccggaacccatattcatccgccggctttaagacgcagatttgcactttgacactggcacccgctttctggtcggcagctatatacctcacgctgaagcatgcagtgaacattctggggcaacaaaactccgcactgagggcgaagtggtatccctacctctttgtcacctgcgataccgtttcgttgattctccaaggcgctggtggtgggcttgcggcagcagctaaaacaaccaaagctagtgatatgggcagcaatgtcatgctggccgggattgtttggcaagtggtcaccttgacgatatttggggtgatgtcgggccactttcttctccgtataaagaacgccccaaaagatggattgacggttgaggcccgaaaagtctggaacagtcgcaatttctgggtattcttttggggtatctttgtggcattcataacaacttatgtccgttgtgtgtatcggtaagtcactggtgataatatcttgatatctgctgagtactgatattggagtgtctagcatcgcggaaatggctggtgggtggaaaaatcacataatgcagaacgaacttgattttactatccttgaatcgatgtaagtcgaactttgacaacacaaattggaagcatttgaaagctgatggatcctagaatgtgttcagtctctgtgatagccctatgtatcacccctcctgggtatttcttcccgcaaatgcgtggagattacactagattagtgaaagaagtggatgtgaaggaaatgaaggatgtgaaagatgtgaaggtctctatttcactgtggccagagccaccacgctatcaggaatttatttgattctggtgaagttacattatcttttggctagatggttgtatattaatgagtgagttgttttcaggatgatttcagatctagacatagaggtttagtggatgttgtttctcaagaggaatgagggaatatatatttataaatcgttgcattagattgaaaaagagatctatgctgatatattttatctagtatgaccatatacactttgaaaggcaaagcaactattgctccttagccaacgcgataaccttctttgcagcctcctcgaatccatcaaatgcatgcaaaggaaggccactctccgcaatctacggatattcaagttagcaactagacaatggcagcggatattcggatcatgcttaccatcttctgccccagttcctcattcgtacctcgcagtcgtacaaccactggaaccttcatattcaaatcccggaaagccaagataatgccctcagcaatcatgtcgcagcgagtcagtccgccaaagatattgacaaagacggctttgacgcgcgtgtcagagcaaattacgcggaatgacgccttgactgtctccgaagtagctttgccaccggtatcgaggaaattcgcgcagtggccgccgtggatagtgagagcgtcgaccgtgttcatggcaaggccggctccattgactgcgcgatattgtgagcgaatacccttttccgactaaggaatagactagaatacataccgagtgtgccaatattgccttcgccttccaatctgctgtatgtcagcaaagatacagacaaactagggagtcatggatgtgctactacatacttgacgtaaacaattccgtccttttcggcttcaacctccgccgcgacctcttcggatatatcccgcagtttatggatatcttcctgtcggcccgagctacggaatgcagcatcgtcgaagccaaaacgtgcaccctggacctccaaaacatcatcgggcgagatgccaatttgcgtctccagcgtgaaggcctctttttccttgtaaatttcccaaagggcttgcagaatgccttcaagctgcttgtgagcagaggctgggagacccaactgctcggcaacatcagcgatgacggagctttcgaacttgctctgagtgtaagggaatgggaatctttgcgactgagccgggctaaatccggaagtcgccgaggcaataatgcatggcgataaagctgttcggtcgactgcaatggaaacagaaacaggactatcagagttagaagccgactcgttgacagggacggatttctgcttgaggatgtcgaatgcctggaactgcttgatgtacagagtacgcttgtgttcagtgttccgtctcgaaattggcgtaactcgtctcatagtatgaaagccacgtttttgtgagccagttccagacattggctatgagtagttagtatagctcagattgggttctcaaagaaacaaactcacacggctagactggttcgcaaacaaagtcttcattccttcgccgaacttctcaggatggttaaccatgaccgcgccagcacgttcaagtgcccgatacttagtttctgcatctggttccccaggcgcagcccaagcaccggcatgtcccataacccgcccaggaggtgcttccaacccaccaacaagggccataataggcctacccaatatcagcattgcattcaaaccccgtcaacaagacacaacaacttacttaggatccacagtcctccgtcgataatccttaatccactccgcagcatccatctccgccgtccccccaatctccccaaccaaaataataccccgagtatcaggatcatcctcaaagagattaagggcatcgacaaagttcgtgcccgccagcacgtcaccgcccatgctaatacaaagactctgaccaagtccagcccgcgtcgtcgacgcaacagtctcatagctcaatgtcccagacttagccacgataccgacattgcccggcgcgaagcaaggcaatggctggaagccgattcggcatttgccgatggcggatataatgcctggacagtttgcgccgacaagacgggttttggattgcgtttgtagcatggagtggatctgtatgtaacacaatcaatgaaaagaactcttcgattactagcacggttcactgtgagtaggtcatacccgaaggatgtcgtggatcggcacatgctccgctacagccacgacaagtgggatttctgcttcgatggcttcttcgatagctttggcggtttggtttcccggtacatagatcgcagatgcgtcgggttttgcctgttcttgggcctggtgtgcttgctcgttagtcaaattacatccttcccaggagaacgtatcagttcaatcctcgtaccgctttgacagatgggaagacaggtaaacctagatgttcgccttcgacgccaggcttgacgcctcccacgatcttagtgccccattcaagagactccttggcattggcagtcgcctgtcttcctgtgcggagattagcattccatggacattcattgcgggactcggctcaattataacaaacggggataattacctgtaaatccctggtataataccttggtatgggtgccaatcttgaggttcggtaaagtgtccgcataactggccgtgcggggggtggttgtaaagcgccttattagggatgtccgcaactggggcgcccgtttatgtacggcgtgcagaggcatagcgttcatggaatacacatgcagattggcgcaatgcttctatagtcggaggaagattatatacaatgtcaacttcgaaatcaatcaagtcaagaaaggctactgagccaagtcggctataatccggtgtcggagctttccccacatttgccgaggaagttggccctttcaagcttttttatacttcgcgtcttcgcacatgagatggatatggggtaaatataaattcatacgtcgttttcgtctgattgaactacctagatacgactcctttctccaatcctgcacaatcaataatcattaagatgaagcttcttccccacaaatctccgcctaacagatttctccccgcgttgttcccgctccgcactgagacccttgagcgcatggagaagcataccagcatcgaagaaaccatctagtaagatataagttagcaaagagtcgcaatataagaaccagcaaccaatggtgcaaaagaggtaaaaacttacatcctcccataccatcatcctccatatagctactctcagcggcagaagtaggagtctcaacacccccacctcttacaagtcgaccgcgacgattcgtctccgcctgcaagatctctgcaaacgcctcggtctctctcgcccgactagtacgcggactcgtcgccttgcgattggtcgcgcgcagcaacttccgaatctcaaacagatacgtctcgagcgtgtgcatgagacgcgacgtttgtctgtgcttagagctcgcgcagatcgagatcgaatcgtccttgataatatagccaataccgaagccgtcggcggacgtagggccgaagccgaagtggcgcagacaagggtttccgcagttcgaggtcgacagtatagtggtattgatcttgtcccacccggcatcggcgaagattgcgggtgttggcgtcgttactgtgcggtagccgcgtgtactgcttccctgtgaggagaaaccgtcgtctgaaggggaggaggaggagagcttcggtgattcaggacactggctttgggtttgggattgtgtttcgccagggctggagtacccgccagttgagctggtgtccgggaagagaccctcgtcgaaggagcgctgccagaggcagtagagggcgtagaggtgacggtccgggccctggccctttgaacagtccttggtggcggcgctgtgtttttggcatgcgatgcggagggcatcgaccttttgttcggcggcattctcgccccagaatgcggtgacaaagtctatgcattctggacttacggtgcggatggcttctgtgcgtccgtgcaggaacatctttgtcatggctggttcgtaggtgttctcagctcggccgtagagaccgtagtaggcggcttggaaggccatctggatgaatgcatccggagagaagcccatcgaggtgatgaagttcttgccaaagcattcaaagtccaggacttggatttcgtgctggcagagcaggtcggatagatgtgattcggcgaagcggagcgcaatgttaagctcgggtgtcatgtcccattctaatttgcgcggtgtcgtgctgacatttccgaaactgtgtgggtcgcgcttcgcagggtcgggactgctggttgcccataggcttggggattgcccgttgatggtctttgcgaagcggaggatggtgtcggtgtacacgtcgctggcaaagcgtagcaccgtgtggccatccacaccggtatgctcgaaattgataccggcactgccgttcttgcagacgatgatttgcagcttgtcataccaacggttggtacaggttccaacctgcacacccttgacgacttcgcatgtgccacaaagcatgttagtacaaagatcggccatggaggctggctccgtggcgtctagacatagaatgaagagcgcggtatcgacaatgttcaaacactccgcgttgttagatctgcgatctttggtcatgatatcacgtaggcccgaccaaactttccggttctcggtgctgagtacacccacagcacccttggcagcctcgtgaagaggagtctgagtcgcatcctcaacgattacctccaggttaagcgagatatctttctcactcatgatcaaatcgctattgtcgtccaagacgtcaaaccagtagaactggccccgagccataacaactatgtgtttagccgtggggtcctggctaattacgcagccattttcggtaggcagacgtgcggttccaaaaagccgggagtactgatacatgcaaaggggcgttccccgcacggtatcaggaggcaactcctctcgacgcacagcccgaacaaacgccaatgatgagacggccagtgatgcagctcgagtcacctggtgatttctggcgggagttgggtcgtcctccaaaaggaagaatggattgaggtttaaaacaacagctgcgaatgttagatgactgcaaaaaattcttcacaggaaatccaacttacgattatcgaaattcaaataagaatcataccctagaaaatgatcagccaacatctcatccaatacttattctgaagacttacagaattgctcaatatagctcgtctttgaactagcataagccttcagccgctcttgcagaatagggccctcattctttaaaaagtcccgaacagcagccttggtatcttcatgatcacgcggggtttgcaagccctgcagagtctctaggtacctgcgacaggtattctccagatcaggaataggaagtttgggcagcgagtcctggtttgcaaaagtcaagccctggctcttgggctcagcaatctccgcggagggttgttcagaagagatatttgctctcatgactgtctggccctgggagtcaggcccggacttcttgcttttgccggtgtccatagaatcactggatggtttggggtcggcgtccgtaggatcaccaagtggtttgggatcggtgtccaaagaatcaccaagcggtttgggggctgtgaagaatcggactgccattgaggagtaagacataatgttagatgtgttcagattctcggaagataaaatcaggcgtagcgactagcgaggaaagtgggaattgacaggaggcgtaaggctgtgcggtagaagtagtggcagtcttggaggcagtaagatggcattggaactatgtcatgcgcagaacagatgcgggcaagggacaagaggacaaggagaagatcacgtagagggggagagattcaagtggcgagggagagggagagagtctggtaattttatataggcgtgcgggattatagaatcatctcgacgggctgtggatccacctcgggcctaaggggaaaaggaaaagaaacaccgactgagccatgtacttacagagcaatgtacgatagtgcaaatggtctgaaaccgaaatgcgggtttgtgtgaccgggtaatacggagggagagcggaatgatagcgccggagaaacggatgagttttctgctacgccgccagatgttaaattattgccaagaaaaggaccactgtggacaagtaggttatgggtgctacagagtccctttatatgggagactctgagagtttgtcccatgtagacatcgcatcttgaggcgtttccatggaggacggcgggtgagataggtttgtcttggggaggatacccctcaccccgtgggggaattcaaggggaaatgataggtgggatgcgggatagaccaggctaagaacttacttcccaaggttaatgtcaatcacgaaccctgcacgtcggcgcaggtgtctcggctcgggattaaagatgtacaaagcgtgccgttgagggtgagaggtttaaggtgaatagtgcttcaataaagataaaatgaattatcggcaagaagaagttcacttataccgccacagttcctcggacttttgaagtataccgaaagcgctcttttcttcatgtaccaatgacgtttcgggcgaagggaccggtcatgcgggggagtgggggtcacgtggacactacgtcatggggctaaaaagatcatcccagcgcatccaaaaggacatacaagagaacatacaacatacaagagaacatacaacatacaagagaaaattgggaaatcttacaatttcgtggatgggcatgttggaataacttcatgatacgctggggttgtacacagtacatcacgctcgaaaaataaaaagatgacgccagagattttgttatccacaggatgagccgcgacacaggagtggcggaagacaaggagtccaaaaatattcacaatggaacaataatatctgcattgccatgggtcctccaaaatagaaggacgaagcacgcttgcatacatacagtatgggtcaccgatcgaggcaggacatgcaaatgacgaagaaggtaaagacaagaagataaatacacaacacaaatcgaataggagacatattgttccgaagaacaggatggatttagatcaccacataagaatatcagatgtggcattctcaaatcaacacctccatatattccgagacgtttatgaagtgggcttcaagacgttgtcggcatactcgccggcgtagttaccaggggagccatagttgcagacagtgtaaggcgcggcgctgccaacattgcccaagtcagagcagctgacggtggcgcaaccaacttgagtggtagctttccagacgatctgagtgaagtggccccacttctcgaagttggtcatatcagggttggcctcaccgtagaggttggcgaagtatggcgcctcatcggtgtacatcattccgctgataatcttctcaccgacctctgccgcgtcgtaaccgtaggcgatgttctggccgtagtctccgctggcggacacgatggaactagtcacgttaggattattgtttctcaagcaaaacagaggaatacttacgtgtcgtgtccgtacacgcaacgagaggcgagggtgttggcagctccggcgaggtcatcggaccaggtcagatcgcctacagagtgcgcgctacggtggatgttgtggtagtacagaatggactcctggtaggagtcggtagagctggaggtggcagcagcggcggtggtcgaggttgccgaagaggtcgcgacggaggtggtagcagcggcggtggtggtcggggcgacggtggccggggcttccgaagaggtagcgacggaggtagccgaggaggtcacggccacgatttcagcctcagtagtcgaagatgggacgatcgaagaggtggtcgaagacgaggttgagctggtcgcgctactgggttccacagcctcaaccccggcggcagtagtagtcgaagccgcagcaggggcagactcgacctccttcctggaaacatcgacagtggggtgggcggcgttggcggtcttggtggactgcttgaccaaaacagcagtgttgagggtgctggtgctggtgggccactgggtgatggtttcggtgacggtggtggtagtccactgggtcacgtaaacctccttctcaataactctggcacaagtgccgaccgccaaggcggcaacgatgacagcagaacgcattgtaggatttcagacaaagaaacttctccaggaagtttgttaaaaaaaaataagggtcgggattgggtcaagcagatcgactgttgacaaaggagtgtgtaggtagaaaataaatgaatggcaggccgaggagcaccttctttcttcaaagagtgaaagaaagatcagatgcaggcttgagggattggatggagagaagagagaagaagcgaggaggttaaagtggtaaataatgtagaagggggagatgggagatgaggaggggggccgtgcgaatattaaatttaaatgaagtcctggagatggagattgaacttgtaagtgattattttataaattattatatcgtcaagaaaacgtcaatggctttctcctatacttattcccttttcttgggctttccaacctcttgagattcaaacatgcctcgatgtggcacattctatagtacattccacggcctagataccatttcacacagatatgaggctggcgatttagacctccaagagatattctccgtacaacataatctcgtttgaagtattaagggtatgagcatattaaaaattaaaattaagaattagggatatacgatgcgtgatgtgtcccctggaagtatggcctggaccacctctacaacaagtccaccgtatggagcccgtagtcagtactgctaatcagaagaagccctgagaaacaaggtaattaaaagtaccgtgggtttccactccatggaaaatctccgaagtaaactagaaacggagtctacagccgtgaaaaataagggcaagatcttagtatcgcaggcgacagccaacactggaagcccctggccaggaacggtttcaagtgtccacatcggagctttcaccaccaatcagaggaacgtgtcgagaaacaaacaaccccaccagaacacccgcttctcccactaagaaacttggcttggaggccaattcggcagtgagcacgggcggatctgacttagattaaagcaatcaacctcgtttcagccactcaattatgacgagaaggatcgcccgagacactccggagcaaaatgggaattccttgtttttgattatatgtccaagttggagggcatctgtgtagcttttgatattccgaggttccaggccgatggagcactccgttccttggatctgcgacaagtggaagatcatgcgacagccaatcagagcgatatgcccgttggcacacctcgtccacggatccttgtgggactgggcgcgtatacatacaggaaggggaaattccaaaacatcgtattttcaaatctgtacaatcgcatttggccttgtaggagtacggagtagaccactacagaatattccgcagattctagtcttgaacatgtacctccacctttccggcagcagggtccatagtctgaaagtacagaacatccgctctgaaataacgtaaattgtaaaacgtgcaagagttacccaaccaaatgtccaaaaacgccacacaacactcctgatgtaattcaaaaaagtaagtaccaaactcgtagcgctcgctagagatttttagtttggcatttcccagtctcacaaatcatcatgtagttcttggctggctcgccggccttcaaatcttggaagagagcatttcgggatttgagccagaaggacaggtttcccacaaagtctttcagatgtgaggggcgaatgtcgacaagcgaagtgaccacgacagacgaggacacggccacgccggcctcggcccggacacgtcgctggatcaggtcgagtgctgacacgggctcatcgttccgactgaggaaattgtcgccacgtggcttagggaccgaagagacatcgggcgtggagaacacacccgtcactgtgcgagtgccaatctggaggcccacaatcacgtccagcatgcctacaaacaggaaggggtgctggatgatctccaccgcgaaggtgttgcacgtctgccgagccagggtccggtaactctcatccgcgagaagagcggacaggcgcagtagattacgcgcaatgactccgttgatcgaaggtgttgctgactcggtgccagttttgagacggaggatcggggcaggcatgccaggggtgacgacggaaggtgtactgaagtatccggtagctgtagagccactctcatccaagaagtattcattgaggtatcctagaatcacaagttagccacaaggtcccgttcatagaaatggggctattctcactttgcaatcgctccgcaaattgaagatagctgtcgtcgtaagtagcctcatacatatcaagcaatccgctagccaagtatgcgtagtcgtcggcaaaacccggggtgtctccacgacttccatcgcggtaaatgcgccatagctgtcccgtgcctttatcgaagagcttgtccttgatgaaactgattgcccgtgctgccgcttcgcgacaatgcacggccttggagctctcgatctcctcaaacagaacactacacttggcaagcgcaccgatcgccaatccattccaggccacaataatcttgtcatccaggtctggccgcccgcgtgttcgttcgcgataatcgtgcaacttcagctttgacgacttgatgatcttcactacttcttcctcgctaagaccgaagtctctagcgagtttgctcggcgtggcacggacggacaacacgttctggttcatgaactcatcgtgagggtcatactcggggggcacgttgccgtcagggagaacaccccagtgtttggcgcagactggagcatcccgagggccgaggactgaggtgagttccttcagcgaccagacataaaaggcaccctctcgcttttcggtgtcatttggatgggggtaactgtcggcatcttccgaggaaaagaaccctccggtgggcgactgtatcggggcgctcgtcaagtaggcggacaaatcatagacagcgcctaaaagttcggggtcgtgagtaagccggaaagcatccacgtagacatccaacagctgtgcctggtcatacagcatcttctcgaaatgagggagaccccagtccatcgtcacgctgtaccgtgcgaatccatggccgatatggtccctaatgccgccacgagccatgttcactagcgtcgtgacagccatcgcggttgcttgttcacactcatcatgccctacaacatccgtgacctgggtcggataggcaccgagccggattaggaagctgaggttagagggtgtaggaaatttcggtgcgcggccaaagccgccattgaccgagtcgtatcgagaggcgaaatgctgatacgcttcttctagaagctcaatatccatttcctcgtcattatcattatcgcggtcaccatgtgtcccttcctcggcaaactctttcaactgcttggtgatttctttggcgctgtcgagacaacgctgctgttgtgtctgccacacatctctcaatttttctaaaatctccacaaacccgattgcctcggggcccgtgaatgtgtttgaatttgggccttgccagtaagtgccaccaaacacgggctcaaggttaggagtcaaaaacacattcaagggccagccaccagaacccgtcgtggcctggacataattcatgtaaacgtcgtcgatgtctggtcgctcttcgcgatcaaccttgatcgggacgaaggattcgttcagaatcgaggccacctctggtgacataaacgattctctttccatgacatggcaccctaggcaatattagaatgccggtacgcccagtgaaatagttgtaacctacaatgacatgcggagtaaccgatactgagaaagattaaacgattgtgcttcttggcaagctccatagcttttgcatcccagacttgccatgctaccgggttgttcatatgtcctcggacctgttattccatgagcgtgttgccatttatctcataggaacacatctctcacatagggggatttgctttgctgcagacgattgaccattttggagcttgtgtcaggtacgtcatggcgcgggtgtgagtggttgatcgaggcagccattgtcactggatttccaatacttctgctgatcggagactagacgtccatcagcccggggctgaatagtggttattaacgggttctggcagtacctaggtacccaagtttagaagctacccaacgtgggatcgagtcctgatgggatataacggcttgtggcacaaatagtatcttttaaactagggtgagaaatgggccgggttggcgcgggttagagcaggtcggagcgtgtcttgatggataaagtcgtgtgcgggcgcgccatttaggcgggggagtcgaggcaagggtcgcggtcgcgggagatcggccccgtgcgtcatggctgcatcagcaagtcacgtgatctggttgtatagtctacaacatatgtacatgtttagtgtactgtttggtgtggtatttaaggcaccatacatgtctctgctaagtatacatatgttcaaaacataattgggtatcacatcatctaatcgtctcccattagctctgccaactctgcctcttcctctgccgttagcatggattcggctggtttttcctcttcctctttgtctgctgcgggcttctttgcgagttccacggcctgctgaagctcatcgggtcgaagggaccattggcgaatggtcgcatcaattcctacgctgacaatggttgaacctacaagcacaagcccagtgacctcttcgaagtggccagagaaagtatgatgcagtgctccggtctatattaatcagcacatacgcataaaaaaaccaaggaggaaagaggtccttaccgatcggttccacactctaacttcctcgtcccgacaggcagtcacaacccagcctcctgcttcatagacaacaacatcacggacaaagtcaggatgctctagggtcagattggccttccagccatcctctcgaatcaagcatttggcagtcttgtcagccgaagcagtccagagatcaccgtcattatcgaaaaagagcttgtagacactggtctcatgtggaaggagagggtcagtagtatcaccaccgccaaagatactgaattggcgaatctcccggtcacttcctgcactaaatacgattggtttggtgctatccgattctgggtcaagggcaaggtcctggatgctgcgagagtggcccttgaaggtctctaaccgctctccacttgtgatattgaacaccaggacttgtgcatcagcaccaccggagatgagcaggtcctttccaagtaaccttgcacttatgactgattgaacaaagtcgacatggccttcgtacttctgacgtggttggcccgtggccgtatcccagctccagatagcttggtcccagcacccggcaaataggagcttgccatcggggctcaaacaaagacaagtaacaggagccatgggacctgtaaataccttagctgtttcgcctgtctgtagaaatgtaagaatttgcgacggttttgagataacaggtgcacttacggcaaggatgacccttctcacagtgccactgctttgcgcaacataaatcgagccagtatgccagggatctggatgaactgctaggatcttgccctgcagtcgaatagggtttccattggtgttctgagacttggcatctttccgctcctgctcatccaaagacgcgctgtgagggacgtcaatcaacacattccgattcaaagatcaaacaattgctttgactcacgatgtctgaaagaaatgatcccggttcgaagaggtcgtcatcgtgtctccagtctctcaaaaattcaggcaaacgtaacagcagctctcatttttccccatcaacttctcccccgccaacttcaaaattgctatccgagcttacgtcgtccaccgtagcccgtatcctccacaaaaccacagaatttgcgtttcctctcccttcccttctcttcccaacctatctcgtctctccaaatctatccgttttcgtattctttctcttcgtatccctcgtttacttagtccgcgcgatatcgcgcacagctgccatggaaatgaatcacctcatagggtcagtctgaaccggttcggagtcaaggtggccgggagttaacatttggcagtcagcgtttcaacctgatctcgaaaagtgacattcggtgagtttatcagactgtcaattgtcttctccgccattaattgtcttttagttatgtcggtactcttcacgaaatcaaccccgaagcctccacgatagctcttgagaatgtcatgtcattcggttcagaagggcgccgcggcaaccccgccgaggaagttcccccctccaccagtgtttacgagtacatcgtctttcgaggaagtgatgtgaaggacatcagcattgctggggaggatcaaaaggagcccgcaccgcaagaagcacctcgggtacccgatgaccctgccattctcggggtaagtcatcacagctctttccttgatctacaacgtcatcccccacaacccaccgcacattgtctcggcgaattgatcaagtgacgagaaattctcggatgtaaacacatatctgtctgaatgcgcaaaaccatgttgagatttccgttgccttccttctgatgatcaattccccttggacttgttttctgtatcgttttgtatacagcgtgctgactagcacaaatagggcgcgaaacgaccagttcctacccaagggcctgacccgggacttgctccacagactcttcctccccagggccctccccagctgccccagggagctggcccaagccctcccggttaccccccgcagcaccaattccagcaaggtttctaccccccctacggacagcgatttggaccacctcctccgttccctcccggtcccggtttccccccgtatggtgctcctcccggatggtacccgcctccggggcatggattcccccccggtcctggtcaattccagccgccgatgcccattggccctggtcagcaacctggacctccacagcttggacctcagcagcatggttctcagcgcccgggacctcccggtgccgcacccgcatctaagcctacatctgaactcccgatcggggacaagcttcccagcaagtctacgagcggtaacgcaaccccagccgctcagaacgcccccactcctccaaacgactcgaagcctagtgtggccgaagctttgcaggttcctgttagtgctgctcctgtccctcagaagaatggccgagttatgccagctatcccaatcgctgccccaaggcctgctcctccgatcgccaacattcctatcgccgctcggggaaataaccagtctatcactgatgccaccgcggctgccaccgctgccgttgctgccgccatggccaagttgcctcagcctggtgctcaaaagcaaccaggacaggccgaaggtgccgtggatgcgcttacgcagcagatgaatcacatgcgcccttacgacaacacccgtcctccccgaggtggtcaccaccaccctcgcggtggtcgcggcggcgcgcgtcctccgcagcagagcaagaaaatcgaagtcccccaatcggattacgatttccaaactgcaaacgccaagttcaacaagcaggatttggtgaaggaggccattgccactggagttcccgttgctgaagccgaggtccatgcagccgaggaggcagaatccatggaaactatgtcaaacggcggcggctcttcggcccacggctacaaccgcggttcttcctttttcgacaatatctcaagtgaggctcgcgatcgtgaggagaacaccactcgtgttggtggtcgtgagtggcgcggcgaggaggagaaacgcaatatggaaaccttcggacagggtagtgttgatggctaccggcccaactaccgcgggcgcggccgnnnnnnnnnnnnnnnnnnnnnnnnnnnnnnnnnnnnnnnnnnnnnnnnnnnnnnnnnnnnnnnnnnnnnnnnnnnnnnnnnnnnnnnnnnnnnnnnnnnnnnnnnnnnnnnnnnnnnnnnnnnnnnnnnnnnnnnnnnnnagggtagtgttgatggctaccggcccaactaccgcggtcgtggccgtggccgcggctttggtcgtggtcgaggtggttacagccgtggctacggccgtggccgcggtggccgggtcacctctgagtccactggtgtcccatcccagggttgatcgggatttttttgattacatgtctttctagcgatgattgctatcttgttttcatatttggggtggcaagacctatgaccgaaacgaataatcacacttgaatcttttctagtctcttcggcgcaaggcagactggggccgggggcatattgggttggccatgcgatcctgcaacagcaatgtttctttgtgtttctttgtgttttattgttatgttcctttttttttttttttttttttttccatctgccacgcataccctttctgcggcgtcttctgaaattcctggatccggtcgaatcttctctcatgttttcactgtgcagaaagtggcgaatgcaccatgatatctcgtgctcgcccgcatggagcagagatcgttttttttttgtaaatcatctgggaggaaatttccccaatgacctaaatgaaaaggcaaaaaacgaggccgaatggccttccaatctgtttcttccttgtgtatctattctaaagcggtttaatccgcatctcatcgaggcctgagaccccagaaagtagcttaatccggtagtaagttgtatacatcaacatttccacacgtctgtgagcaccagaatttgtcatatctctctcattttgtacatatttatacatatcctggttgtgagctctcttctccgatcttgatacatcatatatcgcacttaccttgaactgaccgcttcttatagattgctaacccagagagcaaccttggaagagtacaccatccacactgagacagctccaatttcgaccattcaaagaacaattggaaaccttccgacattctctacccatgtcccttgcttccattatagattcgccccgccgccatgtgtgtaacacgtagatttcctgtccaggcagtcactgttcagagccggggtttcttgttccttcgttgtagacccaatatatatatctatcgtccatggcgtcccgcagtcttttccagactatctgttatatcaagttacatcaaagacaactccatgtcgtcttccactcaggttgccaacaagttaccctgggatcctaacagtaccaagttcccttcgcggaaagatcttccaaagcttccagatgcacctgatggcgccgcttgggtctggggcaatgatgatgaggtggatactgtcatttatgtcgatatgttctattttatgtcgctgatccatcagatgtataggtgggcagattaaatctcctgacgccgcagcgggtcaaggcatctgctgctgagattgatactggagagatggtgcgactggagtaagtcgagtgaactataagattgaactccgcttacaggtatgaatatcaagccttcctctcacagtacccgagaagccggcttttgaccgcgagatcttgcagcataatatcaaaacgcttgttgatggcattgcctatgatgatacttatatcatgaacacccagagcgggacgcagtgggatgggttccggcatgtaagtgattataaccaccaaacgaaaccttggtctaatacgtccatagttcgcccacattgacagcaagtgcttctacaatggggtatgcaccgaactcgattttccatctcccggaactaatccatcaacacccagaccaaaagcagtgactttgtaggcgacactgtaaacctccgctgcagcatccaccattgggcaatgcacggaattgccggtcgaggaatcctccttgactactaccactacgcgaaaacacataacaagccctacgacccctatacaacacacagcatcaccctatcagagctacaagcatgcgcgatctcacaaggcttagatctacgcccaaagtccgaaggcggcgacatccgcatcggagacattctactcgtacgctccggcttcgtggagcggtactacgagctcaatcctgagcagagatatgcagctgcgacacgctcccacgatgacctgtgctttgcgggactctcgcgcgagtccgctatccgggactggctgcatgattgttattttgcggccgtggcgggcgattcgccgacgtttgagtcgtggcctgttcctgaacatgactatttgcatcagagcttgctggcgctatgggggtgtcctataggggagatgtgggatttggaattgctcgctgagaaatgtcgggccagggggaagtggtctttctttatgactagtgctccggccaatatgcctggtatgtattttgcttgtgggccttgcggctgggtttatgttgggtgtatgagctatgctaactaacgggttgataggtggagttggttcccatgcgaatgccaccgctattctttaggggttttgcggtgtatcgagggtgttaattagtggttgtcaatgcaacgcgacgctacttcgaaccagcttctctattcagctgttgaagacgaactatctatgacaagtctacagtatggaatataatcatccatatcaggtacagcgtcatacataaaagattcatacgaatcatctacctaaaactactaaaaagactaccatcatgtcgtcctcaacgacagaggcagccgactgttcttgttaaagtatacgataatgggcataacgaaacccagcaccctacggtttgtcacttgccaatctttcataagcagtggccagaatatacggcctcataatttcactactgattataactgggacagcattctacatacacacaggagcaggttatttcctaatcttgccccatgacattgttatttcttttcttcctcctttgccgacttccaccctccccctattgctttcgagcggcctgtgtaggcttttgccctatgacaagatagaaatatgaataaagccgcagatccttttgttgtaattcctcctgcacccgactaatcagggcatcagtgtcttcctttgaccagcccaatgtcctggtgaatagacggagcgtatatccttccagcgcgcactgcatctggtacacatagaaactcccaattcttttcagatttaggtcgtcactccacttgccaaagggaacctagttgcaggcactccaaattcagccgcttaggctacaatacgcacaatgattatctttgatttttgttccattttaggctcacctaccttgaatatctgttcatcgacttgcacaaagccagctgagtgcatcagctccttctgctcgactgctacgttgattcgcttgtcaaacttggtcgccgcctcgtgtatcagcgcctcccactcccttagtgccactagccgggcttcatcctgtgcgttatcggtaaagaagtgcaagtcattctcccacacttctaaccaccccccggggagaagatgccggaacgcgttagcgtaggacctatcatagtcggtaatcatcccgcctagcgactgcgcatgaatcagatgaaacgcctgttttgtagtgaacggccaatcgccctcaagctcgtggcgttcaagatacgggagatttggagacatatcggtcaggtccatacccgttaagcgcggggcaggacgatgctggtccagcgccatgatcgtccaggagccgctacgggtagcgaactcgagaaacttatggtttttcttggccggatctaggggggcaataaaggttctgccgtctagaagatgccagatggtgctgatcatcgcgtgtgctgtggtagcgttttcgtcgtctggaaaggggaattcgggcttgaagccataatagcggcgtccattttcgtatgtgtggttattgcgtgcagtcagccagttcgattccatttttcttcggtcagctacctttccttttctcgtgggtagagatcgggggagtagtagtttatatatactcctctctgctacagtgaagagcaacacatagattgtcccagtcgatttctaacggtcttgagtcatcaggcgtcttgagatctgaatcccacgattttgcgggccttggagttgtggggtgtgggggacgctagtgggcggtctaatggcctggcaggtcttgagacggcggaatccggggttgtcgtttcttgtttccttcaaaggtgaaatttcatcttccggtctttcgcaaggcaccagattatcagttccaccatgagcacccagacgcaaatagagacaatcgtgctacagacaagagcttccaccgaaacaatcccagccgagaatgaaacattccaagactcaagatcccccgaaccaaaatggatgtatgccaaaatcctcagcgcggggttgtccttcttcgtcgcgggggtcaacgatggaagtctaggatcgatcattccctacgtgatacgcacctacgatatcggaacaaacatggtagccgtcctgtaagtacgaagcgcagaccaaggatatccatctgcaatacaacactaacatatccagatatggcacaaccttcttcggctggctagtcgctgccctaagcaacggcaaaataacccaatacctagacctaggcccaattctgagcctaggcgccaccatccaagtcctagcccaagttctgcgcgtctgggaacccccattcgcactgtacgtggtaacattcttcctcgccagcttgggtcaagcatacaacgacacacacgctaataccttcgtctcggcgctgagcggcgcgcaccgctggcttggctttatccacgctatgtacatggccgggtgtttggttggccctttcgtagcgacgggcgtggcgtccgctaatgtcgattcgaagtggtatctgttctatcttttcccgcttggcgtgggtgtggtgaatcttgcgtttgtgggtgtttcgttccgggatcgtatggctacgccgactgtcttgaggagtgagcgaggaggtagaattgcttcgaattctgcgctcaaggagatcaaggatacgctttctacccctggggtttggctgctgagtttgttcttttttttctttcttggggctactatcaccgctggaggtttgtcttctcttgcttgcttctctgcgtgttctgtgttctgtaaaactgattgtatcaggctggatggtcgagtaccttgtcaacgtccgcaacggcgacgtcaaagcaatgggttatatcccagccggcttctacggcggcgcctttctaggacgtcttatcctcgctgagcctacgcatagactcggcgagcgacgaatgatctttttttacgctttgctatgtgtgggtttgcagttggtattctggctgtgagtttggcactcctctatgatatatttctaccaaccccgatatactgcattgtctgtactaatcctggtggtttaccagcgtcccgaatatcatcaccgaggcagtagcagtcagtctattgggattcttctctggtcctttcttcgcaacagtaagtgtttatcactgaattttcctgatcccaccctaacatctagcttagggtatatcggtcggctcaaagatcttctcgccacagatccgctcttcggcaatcggtaagcgaacagccttgcccattattcgcgggggtttactaataatccattaagcattcgtcttcgtcctcggtcaaatcggtggatcggtctttcccgctttgacgggaattatcgcgggacaggttggtgtccaggtcctgcagcctatgcttgttgggttgctaggtgccgctggtgtgagctggttaatcttgcctaaggatactgcgttgcatcaagattgaggggattataaaatgagcttcgtggtattcggcgggggtgaacaggacagctttcaaagattaaacaaaccaaggaactagggtataaacattcattacttcgttacatcacgacgaccaatagtgccagaagccagaatcatcaaccagaaagaaacccaatgagatacacacattcccacaattataaagaccaattactcaacataagaaaccccataagcatcattcctcataaggaaataaatggaacccaaagcccttagaagatatcatcgggccattggtaatcctcaaggccagaaatcatagaacccacagtagaaggtgacgtagaaaacacaggggcagacacaggtctctttttggctggcttattcactttgactttgactttggcagcactcgagcgaagttcttcagggaggggcggtacgggaggaatatcatcgtcacggggatatccagatcgtctccgactaggacttgtcttcgaccgcgtcggggtgtgagggctacgatcagggttgagctggcgttgtgggtggtgatagaaggcttcacggtgggagtcacttggcggagcaggaagaggcgtagaccagatggtggagcgggaatcgtcgtccgagacagcggcaggcgaagataccgggcgcagactgggctgactcttcttcatgcggataggggttgtgggcttggaacttggtgagcgggtggttccggggacttttcggggttgaacgtagggagaccttttgatgttgctcgtggcacttgtatttcctcctgcattactttcttcggtttcggtcgagggggctgcgtggttgatggcttgcttgcgcttggccgatccagggctctcgccggcctcggatttcggccatttcggttttccggatggactcagtagaccggagtcaatcagcatggcgagatcggggtcgtcgatgcccttcttcggacagggctgaggagggctcccactatcgatagattcaggaatggaagacttccgtttacgggagcggtccttacccattgacgccggctgtgtcccttttgagcgccattttggactttgagctttagccgggctttgaggggatcttggttcttcgaaggagaaattttcacggtcttcaatggatgacagggccgtcagattggccgcttcagatccagacgccttgttttctgcggcttgttgatccagaagcctttcagacggtagagagggaagggcaccagggacgaacttccttgggaacaatgcgggatccatctcggcattgggaatatttgcttgggctgtaggtactggggcccgctcctcgttgcctgtgagttcacgaagctcccgccgggcacgttgcagtttctcctcgaggttgctaactttcttgagcagcttggtttggcgcgagagttccctgcgggagggttgcttgcgcagtccagtcggctcgtattcatcggaagttctatcgcaatacactgccggggaagcagatggggatttgaagaatgacttcgtcaggcgaagatcttgaagggaggagcgtttggaagctgaagactcagaacgtgatggcgcaccacggttttcttcaattgggtggtgatacgggtctttgactggagagctgtattccatcttgtgctggatcgaccgccaagtctggtcggcgagagcagtgttgacaccaagatcctcagtgtaatgacccttattggttccctggtagccagccttctttaattccgcataggccttctccgcctggctaatgacatccttctgcggcgacttattcggcgatccctcagagtttctgccccatccaccgaagggattaaatgccgaggcaatagccttcccaaaacgaaaaatcccagatgagcggtgctgaatgccagcctgtttgttttcctggaggtagatactgggcggcttttcgctgacactatcactcatagtcgcttcaatgaatcgcgatgtccgtcctctgggacggcgcgggctggaagcagatgccgcggcatgacgagcgcgcagcgaagccagcgagccacgaggtgaagcgcggggcgaaaccttgtagcctgcgccattcgcgctcacgttgagactcccgttttcaccgcgttgggtgcggcgctcatgggatccgtaatcagcggcttcttcgggcaacggccagtcgttcgagcgacgtcgtttgctcagcttcgctgccggcgatcggtggccgtctgcatctgcttgcgcctcttcggcatcgtcgaattgtccagagatatctgagctccaatccgagtcatcgtcgtcgctggatcgtaggtgcttgcgggaggagcgctggtgtgcggggcttgggtcgatgtctatctccatttccattttggagtcgcgggcgctgaaatgacgcagggaggttagattcggtctgtcttatgcgggctttgagcttcctttaagttggattatgagaagggaccttacctttgcagcttgcgttatccttttttccccacgcccttggaaagatgtcgcaaaagtctgtcagaagttggcatagaaatggagtcgagtgctgagagggaagaaataaaggtaagaaatgaggatcgaaatgaagatctcgggagactcgagcaaaggtgatgcgccggtttgtttacatactccgcacttgccaagggggaggtttgttgtggtacctggtacctgtgtctacccctaatctatcgcaatccacaaagtacccaatacttcaagaatgtcccatatccccaaaacaaacactacaaatatgtatatctgtatgaactcgatgctatgtagaattccgcgtgtctcagacatgtgtatgttcgataggaatgtagatatgatatgtcacttagagatatgtatagttaggacagataacgcttgctaaataatggatgcacatgcattctgatgaattggtgcaattcgtagattgaagtaaaaagaacgtcagaatgctaaatgtaggtataaggagatgctacaacaccagtataaagagtagattcaccagatgtgaagtataaaacccatgagaccagcccttgtctgtccggaaagagtatgttccaagagcaatgttgaagaaaatcccagctacagtgagataagagtgacattccctgttccgatcccatcggatgaaaggaacgaggcgcgttgctcttgatgatatagtgaggtaattcgcgaatgatcattgccgctgagagtaagaagagccagctgcccttcctatgcaactccgaattttggccaaacaaatgtctcgcaaagtagtggaacatgaaagaggaaaccagttccccaagagatgagtccaaatgcataaataaatctagggctcgagtagcctcaatgaggaaccagaagataagttatatacaaaaaaaatgcaatcggacccattgacgggttcaagactcgtcgaggcaagcccaaggaaagtatatcgtgttcagccaatatggcaagatattttgaactcattttagatcttattaactcgatggaggagctttcatgaccattttgccgttggcacgcttgtacgccaactcaatgcccatttccgccataagtgcagcgcgactttctcctgagaaatcgcgataacccggataaggctcggtgtcaggccgcatgccattctgcattgatcgttcatcaaggccgaaagtatcttcatggctccttttgccgtaagttggcccagtttggtacaccatacgcttccccctaacgttgtcatacccaccgccgctaccgccgggtgaagtgctttccacagaaggaacaatgtggtttgcatattcatttggtaagggcttgagagacggggtggcctggaccaaggtcggtgtttgaggacgtgacaccggaatatgggacatgtattggtataaagctggttcagccatgcggggatccatgtatgaggtcgcttttggtggctccatgccataagaattcatacctgacatggagtaagctcctcgttccgagggtatttgaggtgccggatacgcaatgggcgttccttcgtattcggatgcattggatgggtgtcttatctgggcatatgcgttctgtggggagtagataccttgcgataccactggtgggggtgtaggaggcatgtgaggagccggataatgcgaaggcgtggagccaaatgaaaggtgtgattggtatgagggtgtttgagagtgtgtcatagggggtgcaggtggcatgggtctttggtagggttgcgggcactggaagccatagtcgggtgcagatggtcgtcgatctggaggaacgaacccgtagggcgattcgatattgctgccattgctgttcgacctagggcgatctatcgaagctgcgtatctgtcgggtgtcgcgaaacgatccgacgatcttgcatacgccgctgcgcgttcctcgccgaattcataatcctcatctcgcttgtcgccccggcgcctcattcgaacatcacgacgaatgcgaacacggcaaccctgctccgcaatgatacggctcagagatgtgctggtcgctaggccggggaatttcttagcgctataaacggtaaagggtaccgacttgacctcgagacggaaatgaagaaacgcgtgcggggtgcccggctttgctgcagcggaaagaggtatttggttgggaagaggcaaggcggaatccttgtcggtatccttggggtccttgatttcttcgtacaggtggaagcttaagcggtaccggccctcatggcgcactgacaggtctgggaagatgaaatagcctgcttgtgaagggcggtcgagatatgctaccccggcgactggcacaccagtcaatacagggcacgactgtggtccacccacccgcccgtgggccataggacgtgcggtgtcaagggttgcgtagaggaagaaattggcattgtaggcgaaggtgatatcggtcttttgtgcgtcgttagccgggtcggactcgaagatgcgtaactcaaccacaggcggtgggtcaacagggcgacggtcggctgatgctatttaggatggtcagtcaacgcgcggccctgatcaggctcaacggcaaatactgacactttgctcctgcgccgcatgctcttgcccgctctggttgttgcatcacgctcaatttgtatgtaagctgtttgccctcccgcgtgatccgggtgactgagtgctccgtctcattatgaggtgccatgatgggtggtctgttggccatttttgcggattgatattatcgttgctagatattctgccggtcgcaatatcagtaaatgtcgatcgcatggttgggggttcgtcctatgtcaatttttccatggagcgcaacatacaatccgtaatcaatggggccttggacgaggtggtttaaggtgggatatcgccttcttctcccccagttcctggcctcacatgagctgttggaaagacttccgaggttgcagtcaagccgataaaaccccccacatacaggaacagaacaaaaactagtccccgatgaattcgggaaaatgcacttcaaataaacaagtgatggaagagtagaggagaagagagggggcagagtgggaattggtgacactaacaagaccccgagccctgggccctctcagtatcaacagaagtacctgttcgatccgcagtggtccccgtaaaccccgtgtggttcccttaatttttttttttttctagtttctattgttctcgataatccctattattttggaagaaaaaacagacaccaaatagatatatactctaagcatgtcatatatgtgtgttacattcaaatctacgagagtcgtgtctttagggctttgaataatacttccaggtaattaataatcatcgaatttgatcccaaaaaaggcaaaatgactggtaaactatttatttctcgatttattttccatggaacgacctctccacgttacccggcgtctatattccgttccaaggttccggccgcaacccagtccaacggatcggagtctctttattttccctggtctccataacgtcctatgcttatattgtagtctacatcattctatggatgagcttgttcaaacaaatatggcggttttaaaagttccaggatcaatgttgattgatgagaatagattgcactgagggatttcaaataccgcgtattcccattacaggtctagtccccctgagaacatcgaccaatttagacattgattgttaatcgccaaaggacaatcgagctgaactccatcgaactaccgattccctctcacaacctggcttggctgaccccactaagccaatcagcaatgtctcgaatgagcagctagacggtttctggcagcaatccccaactgccagctgttcatccaatgcgcgtacagttctatgataaaattttgatctgcaaatcctcgttttcgctgaatccttggccatccctgtctattgcgggaactcggatgatcttctgatttgcctattatggcggataaatcatgcatacttttttccatttcctcttgcaaggcacgatttacagatttatggagaatggtcttgggaatggtctccagaatgtccaaagtacggagtacggagtacacatacgaagcacaatgtcccacctaggcaaatgttgaaagtcacgtcagctcaatcgaggagttattcctcggtattattccgtcaacagttatcggattccctgtcagtttgaacctaatatcgtaccatcacccctccctggtctgccacattgtatgtagacctgttcggtgattcatcccaactcataaacccaaaattgagaaagctccttcgtactgcatttgggggcctgcagatttagttcattacgtggtacaggatctaggaattccagaccgggccagttctaacggctcttttgatatgcacttatccttgttgtaatgtacggagtatgatacatggttattccgaaatagattcttgataactatggagtcctcgtacgaagtactccgtaatgatgtactagtatattcaattgcagatcgcccttgtattttgaaacccattggggccgatgcatccgtgccgaatgacaggcattgatatgatggagccctcctgcccaggtgccgtcccgaccaagacaatagtccaaacgcagagacaagtccagaatgctaccattatcacagccgctttgacaggcgctccgagccgagacagattacgagtttatgcacggagtatggagtacgaggtatagagtagcatgattcgtttaaaggggagcacttgcatatatctatatgcatgcgagaaagactcttaccgatacagataaatgtcattacatcatatactagagtcattgcacttgtccacatagcccattatttctctgcggtatctgtaacagcgctcttcacagacataggataaaatataatatgtatagaacaactgccgagaaagagcatgccaagcgctaacgaagttttcgcaatagtgtatccttctagaatatcgaagcgcgaaattatggcaatgttacctatgatcttcggggggctgggggaagccacactaacggctgaaatcattcaaggatcggaggtggataaggcggttgtatcaattgcgtacaaagtactccaaacggagtaccccgtaaagtcatattctcttagaactaccccattagaaactatcgtctatcatagattattgcccagtgggtgactgttcgcattgagctatggattcccaacccctgcaacatatcttagtggggttgaagctttgacaaagcttggaccgagtgtgtatgtatgtacaacagtacgtatggactacggagtaagaaacataaggaataaaatagatccaagagcgcatcacttgcaaaatacgtatggagtggacgatcctcagctccacaaggagatatgccgggtctagatgatatactagacttacactatcgcttggaatatcttggaataactaagttttgattgtcacttacaacatactccgtagttactggcgagtgggccgatgggattttgatcgactatttagagctgatgcagtactagtctctcatggcccgacttccccgaagccacattttatccacctgcctaatgcagaacaccaaaggtaccagcttgtattctgcattttatatatattgtagcagttcagctgtcatggctggttaactaggtaacaagagggaactttgatgaagcgtatatgttttgtgtataaataataaagtaatctcggcgatccagttcatccataagatctctcttgactcattctgtagttctccatactcgggggcgatcagctgggaaaccttacatatgtacggggttagtttgaactttgaggctgacatcagaatattgaggcggaaatgaacaacaactactagttctactttaggtatggggatgagtccgttggagtgatatcattcgaacctctgctaagcctcaaggactattacaatcaaggcattgctttgtatgcctaaaaataatcttactgcatgtgccttttcttgctgttgagcatccatgtaggcctcgtttgccttgttgccttaaagctctgaggctctatctagcataactagcgttatgcctgctattttagagaactatgggttcttctgctctctgtctttggttttccttgtgaggcctagtttacctcgcccctattcaaagctagtagggtcaaaaagagacaatattccatagattaacccaactgtcatcttgaagtagtcaagcaaaaacaaactgtgtgttaacaatcgcaaggtccttaacatatacgatgttcagtggactgtttcacaagttggatctattcttgactttccaacacaacaacattcaatccctagatcacaactcctgaaaacttcttaacaccaacatgaaaagtcctccagcatagtccgcccatacaacaggcggtataattctgccgaaaagtgaggttatattgaactttaaggatgtcccttcgcccttcggggcatatggtcaaatgaaaatatacagagaagattagcatggcccctgcactaaggatgacacgctcaatcaaagagaagctacctatttttttttcttttacaggtcctttttgaggttatacgggtgtgggtctttatgatgacatataattggtcctacgcttttaggaagtcacgtggtatatagtatccacgtcgaaggttcgaatcgaccaatggtagaatattattattccccgctgtgattggcttaggccttaacagtctagagtcgcaacatcaactcccatatcggctgcgcttcctatggatcttctattagtcttacctggatttgaaacaaagcacttcgcacatatcctacctcccctggagcgagctaaagtcaccaccgtcgacgtcatcactcttgactcactcgagatcgcgaaacgtgcccgtgtacctcccgcagatgttcgccggctctcctcctctattgtcgaggcattgcataccgatattggctttgaaaagccacatacaaacacagggaccagcgatgagcctagctctagtataaaccctgatgcggcgaggacactcagctcctcgacgaaacgcgcgttgcaatggaacactataagcacccttgaccccacgatggatgcactgctaggaggcgggattccaacggggtatgtcacagaaattacaggcgagaggtatgttgcaggtgctcatccatgtcttataaggacaggcaggtcaatctgacatgtggatcgatgtccagtggaagcggcaagacccagttccttctcagcctatgtctagccgtccagctacccaaaccacaggggctacgacggcgtgccatgtacatatcgacagaacatccattatctacgccccgactttcacagctcctagaatgccatcctgtcctctcagcactcccggccgagcaggcgccctcgctacagaatatactgtccgtcaacgccatggacctggagatgcaagatcatatcttgaatttccaacttcccgtcgcgatcgaacgttatgacatcggcctagtcatcatcgattcaataacatccaattaccgcgctgaacacgaatcgaacagcatgcaagccctcgccaagcgatcaaccgagctcgcaaaactaggccatctactgcgcaatctcgccgtaaaggaagacgtcgctatcgtgctctcgaaccaagtctacgaccgtttcgagcctataaaaagcagccagtcaaccccacgcgcagggtttccatccataccaagtcaaacggcaggacgtggatccggccctgcctcccccttcccgaagtctcgcactgaacagctagctactggaaatagccagcagccgccatcctctacccctgctatttcctcatcgccatatcacgcaccacatgataaatacttcgacggctcgtacctgattgctcctcgagcacacagtagcttgttgaacgtcgctcaccaggagcgcttccactctggctggggagatggcgcatacccggagactggaccactgaagaatccagccctaggactcgtctggtcaacgcagatcgcctgtcgaatcgcactgaaaaaggaagagtctttcactgtaggcgtttctatgggtgacgatgcatccacacaggaatctcaattccaagatggagtcaatggcaacacctctcgagacccggactcattagcaatgcctgctccctatcgcaagaaccaaatctctaattcgcagaactaccagcccaacccaggctctgaatccaccacacggaggactatgaaacttgtgttctcaccatggacggcagggccgaaggatacaccgagaaagggccaaccgaatagaagaaatggcgaggtagagtttgaaatctggaaaggtggcgtgagaagtacgtgtcgtggtgaatgatgcatatactataaacgactccattcgtgcccaaagcccaaagcttcagtgcgtcttggaaaggctcgactgtgatttactccagatactagtttgatatactatgttggtatgtcctcgtattggaataagcagtacacctctgtagtacggcggtttggccgagtggcacgggttgaatcctgttgccggctcgaaatatctaccaaccaactgtcctaccataacttctattttgctaaacttctcttaatttaattcggagatgccgaatatgtatctagaatataccgagcaaagaagagagagttagaatatcaaggtggaatatcgctgtagatgaccttctaattctcatgaatcataccacttgaccattggctctagtctttttgtatgcaaagaagaaagtgaaaaaggatgaaaacgcttcaaattaaccacaatcatatatatggacgtctctctaaattaacacatctctttctccccttttcaggttcctttcttctcccccccaacatcctccgacatgctcaaaccctcaccgcagaaacaagataatggatctaaggatcaaaggcaaagagatataatgtgaagacccgagaccacaacgacaatcacaagagaagaatcatgagcgtctcaaaaagagaaaaaaagaaaagcatcaaatttgacttatgacttccgcccaacttctcaagaaaaaaatcgtattgaccttgtgtatatccatccgaaagtatacacagtatacaaataaaacaaagctcaaatcaagtcggaacaatgcaagaggggagaaaaagaaacatcatcagaaccgaacaaaaggcattcaaggcatcaaggcaacatctattgagccttggccaccatcttggaaggaggaatgccgatgccgttgctgttacggtagaacatgacacccttgctctcgccaacggcaccctcggtgggctcaacccagtggcagacacgggcggcggtccacatggccttgaagaaaccagtccagccggtgtgagcctcagtgcggtagtggtcgcccatgacgcccttgatggcatcgctggcctcgtcggcgttgtagaaggggatgttgctgacatagtggtgcagcacgtgggtctcgatgataccgtggaagatgtggcggccgacgaagccgaagtcgcggtcgatggtagcggcagcgccgcgggcgaagttccacacttcaggctggtagtgagggagagtggggtcggtgtgctgaaggaatgtaatggcaactgaaaatattgttagcaaaagggatccgagagaaccgagatttgaaacttaccgagccagtggttcacccacaagtacgggagaccgtaccagaccaacaggttcaaccagccgaacttggagccgatgaagtacaaggcagtgcccgtaaggacaagacccaagtcactcaggacaatcagcttggcgtccttggcctcgtacagagggctggaggggctgaagtggttgacaccgccgccccagccgttgtacttgcccacaccgcggccctcgggctggcgggcgtggttgttgtggccggtaacgttgttgagcaggtacagaggccagccgaagagctgctgggccagaaggttggcggcagtcaagatgggagtctcctcgcaaagctcaccgagctcgtgcagggtcttgccgacgcgggtagcgtactgctcacgggtcttgggcacgaagaccatgtcgcgagccaggttaccagtggccttgtggtgcttgccgtgggagatcttccaggaaaagtagggcacaagcaggagggagtggcagatccagccaacagtgtcgttcagaaccttggagggagagaaggcctggtgaccgcactcgtgagccagaacccagacgccggtgccgaaaagaccctgtacgatggtgtacaaggtccagagggccacgcgggctggcatgaaggggaccgtctcgggggtgacatagttgtggaagagataaaagacggaggcaaggatggccagatcccggaagacatagtacaaacttgtggcggcggagcggtggaagcagtgagcgggaatggcatcgcggatctgcttgatggtgtagtctgggatcttgaactcgttaccgtaggtatcgatcatcttgctgacctcctgctccgaagccatggaagaaagggaggtagaggagggggactggcgagggctgtcaaagggcgaggccgaaacagagctggttgttgaggactctgtagcggggttgcgattgagcgcaacgcgcttggggattgcggtcgacgacatgttggatgaggttgacagtgttcaactccgaagtcacgatgggtatactcccaatgtgtccctactgaaatgaaacaaaggaccggggtttcaagacaagggatctgagattggattagttgagattcgtcaagttgagggcctggggtttactcacgatattttgagtttgggggagtgtagtcgcactagggacagaggttgaagcagatccaagcaagtgccccgttttgaaagagagccaacgagaaagcaggcaattgactagcagggaagaaaagaaagacacgggagaagagaagggatagctctctctttcaaagagaaacagaaaaagcgaaggggagaaatcgaaaaaaataaaagcgcatggaaccgtggggaggtaatttgcataccgccactctctgtggaaggccaatccaaccgtattgcgttttgaaaaatacaccccatctccactcccttcgccctcgacagctgagttttaacgcgaactggccagaagagtaagaatagggctgatcttgtcttgtctgtctattcacatgccgattccattactatgtatgtatgtatgttgtactccatcttcttacttcgatgcgctttctactctgtgtgttcttcatagccaccgcctttccaccagatcccgttcgccccaacgctttcgttattcgctgatgtgatctagacttccccggtgattgtacctctttcacatgccggcaatacgttgaaatccccaactatatgtgggcagatcggaccaacgtgcctcggtgtttgctgggggtttgctaggggtttgctgtacattggtttaggaacctcccatcgaatccgagctcccaccgaatccgagatgcactatcacatacggagtatattgtacgaagtactccgtatggggtagcaattggttttgctttttgcaactattgaaatgcaatatccagcccctgaaccccctacaatataggacagacatgagtgactgtctcttctgtgctccgtaagcccgcatgtacggagtaagcccccatcagagctggagatggactcggcagtggcatgcgcaagggacatgtgatccactttgggttttcgggtgtccgggtataatccggcgatgggctattatctgttctgttctgttcagatcaatccagtctggaaggaagaatagaatactaatctcgagaagctaactataaatcataaatctataaatactgtgtctacaaataagcatatccacgttaaagtagagtgcaaaatacgccctcgataccctcgatacatactccgttatatacaaatcgcctcttgttgggacccttcgggttttgttggggccccactccccctttttgaaaaatacgcaaacgttaatttttactttccgatgtttaattctttagcccctggggccatcacccgtggacaccaccttgccaccttagataagatctgatcgggcggggaccgaggcgccgatctcggacttttgtatattccagaagtgacggcctttcttctgtatgagttatttctatagttcatcaaaaaccaactcttcaatcggtatccagcttactcaagagggtacaagaagccataagtgggcctgcaaccccgtagaagcgacctaaaagaacatcgagttcagctagagattaggctaatccagattaggccacactagtctgtatcgggtcaagggccaacggaagcaagccactagaatatattaccgaggatagcaatggagtacggagtacgattgaagatttcccagaagaataatggattcatgaatcgtagatctaaatacaaacaagtacctcagctagctcatatacgactcattatacatatagttacccacacaccccgcacagacctaacgaacctcctccgtccgtcgctccgaatccacaagccaagatcccccaccagcagcgtgattaccgccagcggcactaagactcacggtcgtcttcttcaaatctgggagtacaagaaccgtctcactatggttacggtagtcaatctcacaagggatcgagcgacgagccggcgccatggaaccagccggatcggccgctgtcgggagctgcggagcggatggcaggaacgtacggatctcaatagccgggagaaggagatggcctggtttctgagggaggagtagaaccgtgaagcgtttggtttcgccgtcacgcgcgaggaaattgccccgccgccggccacctatttgccacaagtctggattgccgtgcacctcgtaggagcattcgaggggttggtcggcgttcccgcgggtcgcgggggaacaccagcggcgcgtgtggcggagacatagctcggcggtgatcatctggccgacggcggcgtgggcggagggccccggatcggtggtggctttgggctggagctggaggtcggctgtgtgcacgactgggatctcggggacgtcgacggggatgatgatgcggcgagtcgggatcgtgggttgtgcggggagctggatggtggagttattctgtttcatatgtgagtaacctcgctcgaaacactcgggttggttcttaccttgtgccattccttgagccactgtcgcacatcctcgccgggtgatttcaaagctccaagcagatcgtcccatcgcacagtctgatagggcagcatgtttacctccctaatcagcccaatggcttccatgtcattcgtggacagctgtgcgcggaaactgctgacaatgtgcgatgtaagcagcgatgcgtactggcagaatggactggagttgatagaagctgagaattgcttttcgactgcgtcgagacactcatcgtcgatacatgtgaagtcaacgctcagttgtaggctacgcggtgttgatgcgattgtgttgccttcattatggcggattttgtaaagaagagacgcgggctgcttggggaagacatcaagggcaacggggccggtgatgctgctttccacatcgtaaatgtctgagctaggtagactgcagttcatgatacgaagcgggatcagcatggccgggctaatggtgaagcgtgagaatagtatttcgtccttgaaaatgtcctgcacgttgaccgatataggtagcgtggaaacgacattaaatgacgccgaggaagcgaatcggccttgctcggtctcataaccaatctctgctcgcgcggagagggtcgaaaacgcctcctccacagtgtaggggatacgcagtcgaacgaatgactgcgcgggaaattccgcgaattcgataatgcccgactcgtggttggcatccacctcgagcgtgccctccacaacctccgtctctgcaaggcgaagccgtaggcctgcagtacccggccggacacggatcgtgccactcttgatatcgttgcgtccgctgtggagttccagctccaacgtccgcatggcctggaggttaatgatatgcggtgacacgatcttcgcccgtagggcttcggccggagggtaacaatagatataaggctggttgtcggtttcctccgaatcttccgtttctcggaagccaactggaagggtggagtcttgcccgccgttgaagttaaagacaagattgccagccctcatctcgagacggtcaatgaaatacttgccttgaagtgtagtctgcgtaaaagttagttacttgtagcgaaagttatcctacgagtgcttaccgagcagtcaatcaaaagctgtgttgttgatgatttcaccacgaacttggctgagctctcgatccaatgctcagaattctgagagctgttagcgctgaccagccgaaccttgagattgtcaatctcgatctgctgacccaagaggaatcgcaaagacagttggatctggaatccatccttgtcgtcgtacagtcgaatagctgggtcgacacggagttcgccaaagaagtccgtcaaggaagcagggatatccttttgaagagcaccagacgcttcaaacaaatcatggacatgtccttctaacatctcttgttcagtagatggaatcgtgccagccacggacttttgcctgactgacaattgcgcctgcgcatatgtagcaaatttagaaagcaaccgtatcatcatccggacatagtcctcgttccgtttgagctccttcaagcaccgcgcgtggagttctaacatgcttccttccagaataatccagtacttagagccgtagaagggagccatccgatggaaataggaagcagcagactcgtagtctttccggcggtatcgtatgatagcgatttcagccagggcctgttcgacggagttgacacggttggctgccatatgatggcggatcaaacggtctgtgagctcttcatagagaaacaggaaggcgtcttgcgactttaatgcggccttgaggccagaaagatgaatgcccgcaagcgacgattccttcttcttgggggtctgtgactcttcagtgtcatcgccatccaacgaaatctccgcgagttcacttgccccagaacgatagcgatcatcaaagagaagaccgaggttgttccagttttcagaccagccccgtctgcgagcaatctcctcgagagatcgccgagccagaagaagcaattccgccctcccggatgagagctgttcagaaccagtcttcagtgtgagaataggcgcggtcttggggtgttccatagtcgaccgccgctgaagcaaacccgcactatcggagatatcctgggtcactggccggccaggttgggcaccaggtgatcctatgagggaactagagcggcgaggcacattggtacgggaatctgccaccgtggcagcagcggcttcggtcgattgcgtaacggcatgcagggaggattcggggagcatgagggtcggagtagaggtttgactcaggatctggaaagctgccgagaatgcccacgtggagactagattgttgataatatctgccttgtcatcatgaactacctccgccagaccgcattcgagatcatagcggagggtacgtgcagctaaactgatcaattccgttgctcttgcgcaaatctcagctagcagaataagattttcgggcttcttgcctgatttcgccgcgttaccccctgccgcaggttcgctgccggccagtgatggagctctcgcggctcggagtagtagagtcagttgacgagagaagatgtatgtacggaaatcgaagattgagatatcgctggccaaaatcatttctcggtatgacatcttgttggcgttaaatgggaaatcccccggttgaagctctgaaaagagagccgcttcatcttcaacgccgtcgctgtcatcggaagcttcggtctctaacgcttttttggccctctcggtccagcttttactggtgaccgagagtgcgccactgtgttgatcattactcccatcgagctggtctcgaatagccgcatccaagccaacagctagctcatcgtatcctgccaacgcatcttcaaacaggcccacattctcgaaccccctagccagaccttccttaaggatgaagaacgtgcagaagttccagccaggcaaactgcgctgagagtctttctcctttatatcctcctcatactgcgccacacgcagatcaaacgaagctagaatcccgttcttcattttatcaatcaaatcctccaactgctcggctaattcaggggatttggtccccggcttcggaagacgcagttgggccacacggtccacggcagacttggacgacccattgaaatcagccttcgccttttccagcactgtagttgatccacggccccatttggaggtagtggccgccctgtccgcggcatcaccgtccggttccacgtgcaggataagccactcgaacgcatcgtgcttttcctgactagtagttgcgggctgcgagctctgggaagatgcgttggccttgatccattcgcgaaggttccgtcgggctgtcgccttgtaggtttcgttgtcgtcgcatcggaggaggtaaactttcaggtatggtgtctgccgtagaccggggatctggtgtctgcgatgggcaactgtgccatggacagtgtcgctcgatgattcgcgctcgtttgattcttgcgcaggtacgaagccgatgcggagcgactcgattgaccgcacggggcgggtgggcgatttccagtggaggttttttagggggagctttgcttcgatcacgggctgaatgagcgggaacaagcccgacggatctgtgtattcgactgtattgtacggtcagcgcaagcgcaagcttcattcgtctcaagcaccttggtcgtacccgttacattgctcgaagcctgcgaagggtccatgatttcccgggcgcgatacgggaagtggccaattgacttcaggacatctcaatatccaaggtgcatgggagatttcatgcgtctggagttaaggggaaagtcgcggggtgagggagacatgctgtcaacagcggccacgcacggcctcgttcttttccattttagtgcgccatttcagtgctgcttttagatttggatcacaactgggcttttctttgttttaatatttaatttagagacatatataactctagatatgcacaaaatataggaatctatatattgtactatatgtgacatatattcaacagaaaactccgtaccaccatggccccggatctatacacgacctcacacttcaacctcaaacaccttcgctagcacggcaccaccaaccaaaagaatccctgcctgtataggcagtccaatacgatctgccacagaaaaaggaaccagagcttggttttgtggcctcagcatctgtggataaaagaacccagttgatgtgacacccagccatgccatagaccacgttaggccaagagccctttgccacagcggtttagggattttttgacttggtccacaaaaagatttccaaagtgctttgacgctatcttcgatcatgagacctagaggggccgtgatgaagaataacatggcgccggattcctgcgctgggattccttggacaatatcaaggacgagatgcaggccgcccgaacaggagaaaacaatcaaaacattcatataccgtgctatcaacgaccttcgggtaagacctaatatgtcccgagtgatgaaggcgctgacagatgtcaggggattttgcaacaattggtgccagaatttcctacaatatcgatgtgagtataatatcccttatctttatataactcgatgtgaatgagcttacccccagaagccccgtaccgtatcggcatccagcgctcttccgaacaacggagggcaattcgcaggcgaatcgagtccaagtcctacggcaataatcgaaaaaacacgatggtggaagtcgataagaatccggctaaccacaaatccagccgtgaggtttgagatgatgcgttcaatccattgttcggttgttatatcccactgagggactggcggcaacattccacttttctcttgctccaatgcctgttgcaacgcaagagtagcaaagacatccagagctagatattgccaaacagcaatggctatctggcgaaccaaaaagcaaccccgaggaggcgtgttcataccacgtcgtttataatacgctggctgtggtggggcattttttatttgccagggcgtgttgatcccacgaggatcagtgaagagccgagctgcggcgtaaatttgagccacaaagccctggccagctccagaagacaaatcattgctatctttggggttgatgagtagcaggttcaggcattggaagatgatggtcacaaataggcgagcgagttcacaccatacaaatcccggacctagcgctgtggccaccggtatagctcgatatacaatgaagatagagcatggaatcgacagataccgaagagcagactgctttggtgttgcgattaggagggccacgggtataaggcaatgggcggcatagagaaagagaatttgcagaatgttggaagaggttgacatggcccgcttatccccaagcaaaaggggaaacgcctttgaacgagtgttgatgttgcgagagatgtgattttctccagaaaggggcgatcctttcttattcttcgtaggatctgcagagaatctcaatattgagctgcgtgggccctttacggcgagcgataaatacggaggcgacaaaatatatccatcttgtttcagatcgtgaaattgatgctcttctcaataactatttgtatcttgtttcatacttagaataatatagccaacttaggcgtatcataccgtcactacagactttccacgccactaatgtatagatcgcatctgcaaagtatgttacagcacatgtcacgatctatgagatgatgatcggtcaggttttttccgtccacaccaccaaacatagggctttcccagcctacaagggtctcgcatatgtttaccacttcctccacatagtgatgcttccaagcgtcgtctagagtaggccaggcaactgcaagtgtccgaccaggtactcgagtcataaagagataagaccgggtattatccttagtctcgtgtataacacgagggatcttaaagtaggcttctgaccatggacaaaagctaacgtagtagcctcggacgttgcgccttcttcaagcgtcttaacctaacaaaatacatcattagctatcgaagaacgttctgcaacgtcatatacgaggacgatcctcgggttatctgtaggtagtggaacggtcggaggtagagggacaggcgcgttggtaagagtatagctaagattatcggtcgagtcataccaagaagagacatcggaaggaccgctcgaagaatggaggatcaggtcaccaataagccatgtattctcatctacctgcttgatagactccctaacagggtctgccatggtctttgagctagggcaaatggtatcaaataacttgtaaaatggtggatcacgacagtttgagaaaaacaatagatggaagaccgtaaatagctgggggggggggagataaatacgggcggaatgtaaacaaagggccttgccgtatacatagatacctaggcggtacaaggataatataccgtggagctatgagtgagttaatagaacagatgatgttggctgtggtaatgataatatagggaagtattggtagatatgaagtcccattctgttcaactgtcctaaaattctcattgggatatatcaagcgcagaagtaccaaaatactatgccttcaaagcgatgctagtcgaggtgaaaatgatcaagcagaatgagggccagagtcgataataatagtcgatgctcgccacgttttaccgcgcggaattgatagcaagagcgcgacacgatcgtgtgcgggaaagagggaccgggtatatgttgtttcgatctctgataaggggattcactagtatacccctctcttggagattataatctccagactggtgatttagtagacaacttgtcttatcaaagtttctataaattgaaagacggcaaattcccgacatcaatattctccgctcatatcacagttatataaaccgacatcctagggaattccgaacaactatcaatccccaaatatggacacagctctcaacgacgccgtggctcgatttatcgagcgccaccctgaatcgcaacgcctgcataagctctcactcgaaagcttaccgggaggaaatacccgcactgtgctgcacacagcaccatacccagtgttcatgcgcaaaggctcaggctcggaattgtgggatgaagatggaaacaagtaaatacatcgatctgagcctctagaatgtgtagactaacaccaatttcccagatattatgacttcgtcggcgagttatccgccgggctatatggacactctcacccgacgctgcaaaaggtgttgacagataccattcagaacgtcgggctgagtctgggagcgacgaatgtctacgagcagcgatatgcctcgttgctgtgtgagaggtttggacttgaacggattcgattcacaaactccggaacagaagcgaatatacactgtcttgctgccgctaggaaattcaccggccggcgtaaggtcatcgtcttccgcggtgcctatcatggtagcgtgctgttctttggagacggtatcccggaaaacgacatcgaccaggctgattgggtactactgcaatacaatgatcccgagggtgtccgggaagcgttttcccagaacaatgacattgccgccgttctcctggaggggattcaggggtctagcgggtacatttctgcatccgacgagttcctacgaacaatccgcgaggagagcgagaaagcgggcgcggtaatgattctggatgaggtgatgacatctcggctggcaccgggagggctgaaagatgtgctcgggattaaaccggatcttatcactttgggcaagtatctgggtggaggtctgccattcggggctttcggtggccgacgagacattatggatgtttacaaccctctcacgcccggggctttgatgcactctggcacattccagaataacactctgatgttgcacgctgggtatgcgggactctctgaagtgtatacggctgaagttgttcaatcgctcaatactcaaggcgatgacttgcgtgagcgcttgcagcgggtctttgctggatctaagttctgcgttactgggcggggttctcttatgtgcgttcatgccactaatacgggagttcgcgcggagcagatcacttgtcgagatgattttattggggttgaggctacggatctcaagcagctgttctggttggaactggtgaatgcagggttctgggtgcagaatcgaggatcaattaccttgaacatcgctatgactaccaccgctctcgatgcgtttgttgaagccgtcgaggagttttgcaagagatataaatccttggttatggcttagtatatgtgttatcactacagtgggttcaaaatatggagaaactagatgttcgaagaagtatttagatgtgaatctatatgagaatgtgcaacacaatgcattgcacattagacataacactgcatacctgagtggcgagttttcgatgtaactgcaacagctcagagacaaaggccacgaggttcaagatggaaaagtatataaaagcaaggacagtaagactcaatcgtgcggattctacatagatagtcgtgccgcgtcattatgaacacaaataagaaaaaaacagaaacctgacagttagtccgtcatataatagggaaggttcactcgctcaggaacaacgccatagaaatatatgaccagagtaaaaaagaaaaaaaaggatggcctaaatgcccacttccacagccggctgtgtatagcgagctttcgcaaattcaaagcagtccgtgacaccttgccaaatcccgggaacgtagtttcggctccaggcgcaaataacgagaataagaagagggatctgtagaaatggtgttagctgagtactactcaagaaaagaagccggtggacatgttggttacttacccagatgaagtataggtttcggtcgctgcctagacccttcattcgtcgagcctgttgctctcggagatgcttttgttgctcacgtgagatcacattgcgtccaattgtgatgtctttgatatcgtcattctcgacttgagcgagagaagttgaagctgaggccgaagcggcggccgccgcggcacggcagtnnnnnnnnnnnnnnnnnnnnnnnnnnnnnnnnnnnnnnnnnnnnnnnnnnnnnnnnnnnnnnnnnnnnnnnnnnnnnnnnnnnnnnnnnnnnnnnnnnnnnnnnnnnnnnnnnnnnnnnnnnnnnnnnnnnnnnnnnnnnnnnnnnnnnnnnnnnnnnnnnnnnnnnnnnnnnnnnnnnnnnnnnnnnnnnnnnnnnnnnnnnnnnnnnnnnnnggggagggggcggccgccgcagcagcactgctctgggcctcgaagtgttggtcgatagctgcctctgttgcggcacggagcagactcgacttcttcatgtcggactcatcggtggcatcggggtccgggaacagctcatcgtatgaaggtggctgattgggattgggtgcagaggtgcccttcaagtaatcccaccagccatcccgagcagcaggccgatgagggacaaggttggttatgcggcgcatcattccttgcccttggtagtcttggagggcgggcatcgcgggcattgcgggtatcgcaggcatcggaggcattggagggagagccgggagattggggaaggcattagccacgctctgctggaattgattgatttgaagagccagctggtcacgccacgccacaagaggtgctggtggggcgtagccttgagcatctccggatgcgacggtttgttcgttattatccataattggcggactaatatcttggtgcatactagaccgacgagaagagctgaattgaagaggctccgagtcggaatcagtagtttcctcctcatcatcgaaatcctctgagtcatcaacagcatgatcaagagatccagaggcggaagacgcctcccacatcgagctaagcgaggctgagctgctttgtcggcggcgcgatgtgagggacccaacgctgcgggaccggtagtgacgagatggaagcaatgcggcttggtgcgcgggaagcgtggtcgctaggtccgcggcagtgaagccccgtacgctgcgagtgttggggttggcacccgtcagacgcaatcggtggacgatgtgggcatggccattgagtgcggccagatgcattggcgcattgcctgtgttgtcttgcacatcgggatttgcacctcgagccaaaagacccgccacaaatcttgtcagtcctaacgatgctgcgaagtgaagaaggctttggccggtcgtgctacgagcgttataccgcggtggccggggactgtcatccaagtcgatgaactccaagtaggtcagcatcttggagtcgagatcgccgagcttgccttggttttcaaggcccggtacttggcgttgctgacccccagatgagttaccttgcatttctgactgcatattgaagaacgcgtttggatcgcttcccatgatttgttgggctgtgtggaatgcatccgcttggcttcccaatttctgaccaagaatgttcagtgccaagcgatacatttgaagctcacgatcatccacatagcggaagaacagctgctgtttgggcatgaggggttgagactgttggacttggccaaatgtcgggtgttcatgtttgaataccacagacaccaatcccggttggagagcgggtggggtcaggcagttgaggcacttgtcaccccaaaatgtggttgtagttgccaacgtgtcgccgaaaacaacctccatgccgggataaaatccgctgcccaacaatgtaacctcagtacctcctgtgatagagccctcggctggcaccaacttgtggatcacggatggcaatcgattgagagtattgttgagaggaggccaaagttggcttgaggtattcgcaccaagacccatgggaacatttgaatcatggaagccattgcgattcgagccacctggtgtccccggacgactgggatgggtggagttgggcgttgatgccactgctcccccgaccagggtatccaaactttgtcgctgagcaggtgtcgggttgaagaatggattgttatcattgttctggttgggagtgggagggccatttccatattgacctgacatggcggacggatttacaaacggccgttcagttggtgaagcgaacccacgagcagccgcaagttgcgcagcgttgttcatggccgctgcggatgactgaggtgtctcgagtcgtgtcatagtcagttctgatggaagccttccagagctgctatgtttgcgtcgtttgctttgtggtccttggaattcagatggagatgctcctcgagacaaacttctagacgcctgaggcacgtgccctccgttcgttgagcccggagccgcaaatgaactgggcgtaagctgatattgcgaattgaacctttgttgaagaccctgtagatcagttggcgactgaggtgtaccgaaagtattttgcccgttatcgggggtttgacctgagggaaacactccagctcccggtacttgcgtcccatctgggagggatggcgaagggccagtcagtgcaggcgcagatggggcctgcgtcttgtggtcgtccgttatcataatcgaatttgtaattgcctgcgccaccacgttgtccaagtgatccttcacagtgaagataacctggaatccgagcttctcattttggtgtcggcaatagcatgcaatacgcattggcagttccacttgcattgatcctggtgggaccgacgatctatcgccgtagccaccgctggcattctttgcgggttcggtccattccttgatctcgctggtgttgaagacgatcacacgcttctcttcatctttttgaaacaattcatcttcttcgggcttcctttgcttcttccgtgacgcacgtttccgttctcgctgtatacatccactgcagattttgacatcacctccgtccaacggacgttcgtcatccgaagttgtttgatagcgatcaccccttgtccgtgcaaatgcccgcttgatcttttctctgtcttgcatggcacttgtgcatacgagacttgtaaacaattgaagggtatcgcgggtaggctcggtggcaggaggagcaaggaatttgagttttgagatggtgtgagagggaagacggagtttcttgacgccggtaggtagcggggagagggtcaatcggattggaatttgagtctcaacacgggatttgagggaagttggatgcacagtgagaataggttgtagagagtgcgcattattttgaggttgggctggggaggaggcgaagttgacaggaaattggtatgatgtgggcgaggcgaagttcatggcgggtgataacgaggcgtggagaggtgattggcgattcatattgatgcctccgaagctttcttccagaagagacgaaggagactgtccgccccattgcggagcggctctatccatatcgtgaggcattgaggtcgagtatggagattggccgttgagtccaaaagcgaagaacggagacccgggagcatgaccctggattgttagcaacgcgacaaacaagaatattgttcgaatgacttacggaaggcacggcatcaatggatggcagcccagtgtgattgctcgaaggactccagagctgggatttcgcgcgcttttggggcctcgggagtgagccattgtccgtcttcaatggactagggctactcgctgcactttcgaaatcgaaggctgcatccatcgccttgttactgacttccagatcaggatccatggagaaaccatccataggaaaagaaggatcaatattgaagggcgattcctccttgactgacgataattccgggcgcatccaatcctccgacgggtaactagtagagactagaggattttcactatgcgttgcggagttcgtcgaagcgaccgatgtttgtcgtagatgattccgtggcgattcggaggaagaactgcgacccgagtcatctggcgattcggctggcgagtccgcggcaagactcggcacttgcctcagaggattttggttttggtatggctttgaaggccccgaggcgccattcgcacgggatgttgtggctcgagcgaataggtcgtcaaaatctcccccagcattctcagttgacatctcgagttgtgtggggtccaaaaagtccatgtcgtcgtccatgatgataggatccagggcggagaatgagggcgaaaagggtgcctgagctgatatcatgcttcgtttttttcccccgtcttgatgcttgtgaatcgtagtcgatttcaaccgcccaacagccaccttcacgacaattgaatatgacgggcgattcggtcgctaaaaaaggaatctcggagacggtagagatccaaagagtatgacaatcaagtcttgtcggagtttataccaggaccagtctccgataccatggcccttgttgagagagattcgaaggtggtcggggaaagtcactgccttggggttatctggaggaaaggggagcgggaaaactgtgaacgccgatccaggccggcagaatctcgacaaatggaatcaacgattctgcttgaatttatatagtcgtgatgatagaaattaaatggttatagcagttgattgagacacaaatgattctatgttctccatatactttccagctcaaagtaaagccctaaatggcatttgtgcttaaaatagacacctcaggcctcacaaagcggtgaccaatacagtacgcaccatacgcccacccttcccgtatcttccatcgctttgatttgctgaccctacttctcccgtctgacaggggtgtgaggggatctgactctgggttctaagctgttctacagcatgcggaacagtagtccttgagatcttggaagactctgtatgacaaaataacttcttctcgctttgtgatacactttctcccattcctcgggctgaccctggggcccaataattggaacgaaaaaaggacatgtgtacatgcatgacgacgacaacgtaccgggatgccaagcgcacacagacgccattcctcgcaaaggtagagattgtggcacccagttatcggctgtgtcctaccctcgctctgttagagtaacacaccttggtggcctgcagggctagctatcgttttctgtgtgttgcttattggatatcatataaagatgctatgtaggtgacactatgatgcacttatgcttacgatcggcggaatcgccatgccaagggaccaatgagcaatgctgtgctggcatacaaaatataatggtgccaagctcagcagcgtctagggttagcgggctgcagattgtagagattatgtatgttttgtatagtaactatgaacaaaatgtacataaatagtcctggcatcgctttgcttaaccctcccacgacatgtagttcgagacaacacgggaagatatagtgtgaaatgaaatctcagttatctactctctactcctaaaacatatatttagaattaacactagcagtaaatcaactgaatcagactcacattccagaataataaatctttacttttcatttttcctcgagctaggtcatgttacgactaggtaccttttgtatgcagttgctatacaaaaaatacatcgactctataatttgctattcagcaccgacacttcatgagcttggcacaatcatcttacgagagcctccatagacagtggagaatctcttcttctcccacgtgtataatgcggactggttcgattataaggtcttcatcagccaaagatatctgccctagaggcaaagatctacggagtagttcctagcgagcaatcacacggctaagactggctagatctaatcgatcctgctaaggattcacggtcgttgaactaatttaaagatgtttcaacgagatgaattggtcaaaagtctcaatctatttgataatttgcgaggaaccaactccggaataatatgatttctatgtggcttgaacaatttcacgattttggcgcctttgcaatttagatctgacagaagcgttgaatatagaccgttcgagattttcgtcgtgaactcctggaccctattatgcaggagacggacatgatgtggagcgtctcggaataattctaagcgctggggtctagggatcatatgtaggggttcaaatgaagccttctggatttttaagaaaaagccgttgaggttggccatttatatagggaaattttccaacttactccgtgtttcaacaccgtagtctatagacaatcgacctgtccgaagtcattgtgggataccgaattctccgggtttcccctgaagcggaattaaacaaggtctatctctccgaaacaggagaaaaacccttacaggctggaaagagcggagatgttatcacttcaaggggttcgatgaaacttggactgtcacagacaaccgcccacgatcgacagccaccaaagatatgagacaatatcaaacgtcccctccttgatgatcccaatggagtatagctcaacaagggttatgcactagtgcagccggcggtttacggagtaaagtccatgcttcatctatatggcacatcctagatgtctcggtcgctaattctccacctataggcacatccacaaagtggaatcattgttccctgctagaaacttccggacttgatgatatccgctgcgatatggatttcttggcaacggagtgatgccgcttctgtcgaatgggagctatcatgtcaggaccctacatatataaggccctggcatccgggctactggatttttttctcatccatcctttgcattccattcatttcaaggtctagtaccattcattcgttctctttttgggttgacttcattgactgaagtccccttttcattctttttcgctcacctttgatacttcgatccttcgatctaaacgctgtgcgttttattctacaactttttcaagatgtctgtctcaaagattgcgggtctcctgcttagctcggccgccatggtcgctggtcacggtttcgtgtcgggtgccgttgttgatggcacttaccacgggggcttcatcgtcaatacatacaactacatgaccgaggtgcctgcgaacattggatggagtgaaaaggccaccgacctcggctacatcgacggctctggctacactggctccgacattatttgccacaaggaagccactccgggtgcgatctccgccgaggtcaaggccggtggctctgtcgagctgcagtggactgactggcccgagagccaccacggcccggtcattacctacatggctaactgcaatggcgactgctccgtggtcgacaagacaaccctcaagtttttcaagatcgccgaggccggtctgatcgacgacactaacgtccccggtacatgggcaagtgaccaactcattgctgccaacaacagcgccactgtgactatccccagcaccatcgccgctggtaactatgttctccgtcacgagatcattgccctgcactccgccggcgatgcaaacggcgcccaaaactacccccagtgtatcaacctgaaggtcaccggcggcggcagcgactcccctgacggcgtcctcggcacagcgctctacacgcccaccgatcccggtattttgatcagcatctacagcgcactggagtcctatgtgatccccggccccgctttgtacaccggcgcttcatccggctcttcatcgacctcctcgaccaccgccgcagccactaccgaagccactaccgcgtctgctactgtttctaccaccgcggcccccaccgtggctactaccagtgcctcaaccgtgagtgcctctcctatccagagctcctcttcgcaccacctcacccgcacccgcacccgcactgcccgtcctacgtacagccctactttctcgtctgctcccacgtctgctgtctcaacttccgcccctagtgggccagattatgagcccactgatgctccttccaccctcatcgagaatgcgactgccaccgcttcctctgctcctcaggttactgacgagcctgctacacagaccgccagcaccgccgacagcatcaccatcaccaccaccgccggtggtctgtctgcccagagctccgcagccgtcctcgagtctagcgccacttccactgtcactgccgaggctactgctactgctgcccctaccgccgcagccaccacttccacctctagcaccagctctggatcttcttcctccagctccacctccagctccggatcttcttccactagctccacctctacctccaactcctcgtacctcagctccctgagcgccgagaagctcctcgaggtcatccggtcgaccctgaagtggcttgtctctgacaagaaggtgcacgcccgtgctctagcttactaaaatattcgccctacatgctataactatttatagctgtgtgatgtgaaacttgttactgaacatctgtgaaactggatcgggtatcctctgtctctattgattgttctgttcggactgattgtaacaacaccgtgttacggatttcctttatattctctttcctccttgcgttttgcgcatagagacgataggcctgctttggtcttttatttttctactttacctttatgaatggaatcgctggactgctcaattttgtgatctcgtagataaaagcgtaattcttgagaccgtttctaccttgggttgataggacctgattttttgatcctcccttcttcccctctttctctctttctctctcttcctctctctcttagccagctggtttcctttcctatcggtaacataagattatacaagcactacatagatagccctttgacgatgccatatatcaacatgcagcagtttccaaggtaccacctaatacaaagatgcaaataacttaaatcaagttaagtcccagctttctggggtaagaaaaatggcctatatcagtatattaacagaataggacaagcaacgaagaggtcagtgggaaaaaaagaaatagtcctgggacccggaatcgaaccaggatctacgagcttcgaaaagcataggtatgtgtacttaagacacaagcctacccgtcggggcgccgtgctaccattgcaccatcctagggttaggttgggggtaaggagattgagagagtgaagacaagagaagtgtgttgtccgtggacggaaagggagaatgcaagcttcgtcatgctggagggaaatcatatgtaggaatggagtcaacaatctgacaactctatgttagaagatatagggcaagagtaacacagcggtcgatcacctggcataaagtatgtatcttgactagtactagtatcatgtttgacttcgttcatttccatggtatgcttctactaagtttagtctacctggggctatttgcctatgccatgaagttgacctccccgtcggactatattcatcaagtcccacggggaatcccatggtctagtaaaagctagtaccctaaggaccgttaaaatatatcttcagctccgacttatgaagtatctcaatcttccgaaactttaccattgtatacacctaagatcaggtaaatgagattaccgtcatctcaaggcaaatccctcgaggtaaggcaaatccttagtgattagggggctgaaagtacttgccaatctctaatccagtgttctagacaataacatactactctggagtataggaagcaagcttataactgcttttagatcccgggtctcaggactcgctcatccattcctatcctatgtcttcactcgtcccctatacttgccaccaaatatacctggggtggtgcaatggcagcacggcgccctgacgggtgggcttgcatcttaagtatacatacccatgcttttcgaagctcgtagatcctggttcgattctgggtcccaggactattcctttttttttccttacagaatgtcgattccatactcctatttctgatatttgtctatgcactttatcctatgtctcattggtggtacgagcgaaagctaacagttattatcatttcctactttttgagtatgtggatacagatatatatgtcagaagaatatcagcctaggcgaggatacatagtcgtggggaaaaaaagggaaataatcgtttaatatatgtctcgtgcttattatttagtatcctgtttttcacataaaaaatggtagtctctgtatgggatttagacttgatgtgatgattctaggagaaaaaaatgtagaatatgcagaatcctttctatatcgacaagacacctcgttatcaacaaatcagcccggctagctcaattggcagagcgtgtgacttttaactcactagcaatttatctcagatatctgttagcacttgaaatcacaaggttcggggttcgaccccccggtcgggcaacattaaagttgcccactgctcatcttttttgtatctaatacaccaagatattcatttttgttctgttttctcactttgccgttaactatacttcctccttgtagcaagttgaagtgattgtgtggatatacttattcctcatcggcaaattccaggcgccactaaaaatactatctaggtagtacgatatttatccaaggccttatatactccgtatcattgccaagtttaccagataaaggacatttacgaggtctacagccttggcaggacatctcagtctggtgcctagccctgaagaccagatatatgggaggcggttgatactgatatcaatgatacggagacacggcgagatagcagacacgggaacgggagtggcaatggaaggcaaggcggcgagaggggaattgaaattgtcgaatggaacgggggagaaccatggagaggaattgaagcaacagagtgatggtcaattgaatcttgggttgaagaatagttcttttgttttggggggatttatggcggtgggttggggaatatgtatctgagaaggtagttgcccatctcaccatgtatgtttcatctctagcggtatgcgctgatttattgtttgtacagaaaaagtgctctctatctagtggtatggacagacaatcatttaatcgtcgatcatttcttcttcttggtcttatccacaacctcaatcatctgtgacttcaatccacggcgaaccagggctgtctcaatggcctttcgctggtcgccctgcaccaaaacttccatgatccccttgggggcaccagtagcttgtgtgacactagtgctaccggcacacttcttctgcagctcctgtgccaacagactaggaataatgccgaagacctccaaagtcataactttggtaacggtcttggagcctgtccgcttctcgagggtgacatggaccttcggtgcggggcctgctttcggcttgacgtctgcaagagtttgattggtcttcaaaatgacatggtacggcgaaagcagtgttttatcatccatgagtcgtttaagaagaccatcgcgagtggccttgccacgtgccagtgtccccttatcttcggttgatgatgaattgaagatggtgttcgcgaggaatgggttgagggttatgatgcgcttgttctcttttgagatgatcggggggttttgggattcaagatattgatccaagtgactggaaacttcggagtatttgtagaagttatttgtgtcgctggcagcgagggcagggaaaatggttggcactagctttcctgatggccgatatagactctgcacagtgatcgtttggcccactgaagggtcggagccatccagcgcagccgactttttgccctcgggtgcggtcgccttgttgttctccagagcacgcggtgaaggcaatctgtatggcacaaatcgctcaacccgatggtcctcaaagtccacatcccaaataacggtctcttgaccattacgttccttggttttgacaagcttcgatttgtctagatgtttcatgaacttctttacgttcttccaactggttttcttgatgttgtaatgctgagcctgctgaggtgtgtgcacaggaagataaggagcagtgaagttggctatcaatgccgaagctgtgattggcagtggaaggccatggtctgctgcggacggattatcctgcttgtgcttgtagagggcgtagacaaaagcattgacgaatgcgtcgtcgatttctattatttgtcagtgtttgattgatttgagttgggaaaccaactgctggctgataaagagaaaggtaggggtgactcaccctctgttgggggtgcatcgacctcgatgacgggttcttctgatatccttgggtcattgcttagtgtttcaatgtcccccgaggcagctgtcggctcatcatcctcaattttcaattcctccatttgttcttcaacaccctcggtttcatcctcgtcccagccctccaagtactctggagctgcacggcccggcagtgacgcagagctccacgcccaaagttcatcaccctcccaatgcaatccacggacggcatggccctttgtgccttgcacctctcccaatgccgaaacatcaatctcacagacgcccacaaaaagtggcactgtatgtcggtctacactcgcgaccgcaacaacggcgcccttgaccgccctttcagggaacggaggttcattcgcaaggcccggcgtcattaaatcagctccaccatggagctttcccatcacaaactccggagtatagagtaacggaaccaagttcgggttgtgccatagtgtatagacagttgggaatagtcggttttcggcccccgggccgtgttccagcttgaaccatagcacccgctcatcgccgtcgggatgtgtcccaacatatacgaccccttgaagttcgcgtaggtctggaccagcagtggttgtaaaacgagcggtttgagtgttatcgggcaggagggcattccggatcgttgtgaggctcaatgcgggggcagatgcggtgctgggcccagacgagtctgctttggtgggggccgaggtgacggggatttggtaatctttgataatttggtcggcaatcttcctacggtcagaagaccgtagtggagaaagatttttgatctggtctatatgagcagagagtcctttgcggtgggagggttggaaacccaaagcttggaggggcagtgcggggagagaggtcgtttaccgtaggcttctttttgaacataattgtaatctcaaagctcgaagcttaaagtgcaaagtgtaattgaatccacacaggtcagccgaagacgagagggagaagatgtcaagagtaaagatgtgacgtccgatcaaagaatctcccggagatctccacatggcccgaagaggaaaagaactcgttttcttagcatccgtggaattcgcgacaacgccagtctgactcaaccactttatcaatgcctaattaatccattcttccacgtaatctctcccaactttacagtaaagctggcacagaaaggctgaattttgatggaatgggcaagatggttcaatattaggccaagctggtagctaggctagtccctcacagttgagaaacagggtattgctatggtgagaagcattgttgaggtatttatccaaaaggctagagattacatcgaagaaggcagagatataggtacaagcaatgaatcctcaaagctagaaggaagaaagtcccaagtggtcaaaaataactccggacagatgaagaatagcgttattaaatcgaacgaggcatcgtaaaatagtagattgagacatgaagtcaatcgtccgattgtctcggtattggtttgactggtcttctcgatgggcccattccttgggaaaccacaacccagaagcgccagtatgtgcgtcattgaacaaatggtgctgcatgcaggccatggaatagtattatgtatatggtgcaatttccggaacatatccggctgcattcacctcaccccttggtaggtgcctcactggagtctagcctcaagctcgcatcctctgcttctagctgaatccatcacatcatccgagagaacttcaagatgttttcggttcatcgggactatacttccagcgtcggaagttatctgcaatccaccactgcgacacatgggcggcctcgctaagccacctcgcggcttcgggcccgtgccgtgtctggacggcatcaaacaaggacacgatgtcggtgtcttcctcgggactgaactcgagtgggtcggcgacgacattggtgaatcgccacggggcatcggggataagcggcacgacaagacggtacggtttcccggctgctcgcatagagacccacgttcctccagggttcatcgtggagaagtgccattctgacttcttatcctgctcggatataagtgggcgtagcaacgactggccttcgtatataggaagcaggtccttcagtatatgtgccgactgttcgttgatattggaggtttcgattagaatatcgaggatactggggagcatttgagtcgaaaggacggcgccactgatttcgatcgggggtagcttaggatgggcgaggagtaggggaacgtggaaactgccgacgtgggggtcatggttggccgttataccaccatcatttggaagagataaaccgctataatcgagttaatgaaaggttgatagggtctaagaaaaaagacaacttactggtctcctgccatgacaagcagggtttcatcaccgaccccagcctcttcgagaatctcaaggatagaggctagccagttgtcctgatacttgatagtattgaggtaccggttcaagttatcgttccatccaatgccattcccgaagaatttctcgtattcaccaggcttaaaccaaggagtatgggtattgtgagttaggtgaccgataaagaggcgagtattattcttcttagcttcggcaaatgcgtcccgcatatagttctttagtgtatgatccgggtgaccatatttctgctcttcctctggctcctctggtatgtatatagcgccggcttcattgattgattctttggttgtgatatctttgaatcccatgacaggagtaagatcctcctggtggtcccaggtaccataatgggactgcatccacttagaatgccacggccaggaggtccaatcctcagtatcactagtgatatttgattgttggctcaaagcgtggaatatgtgcggtaggcaaggctgataaatatcatgcaggtactcaagattaccttggacaggcatagggctcacaccgcacatagtgcctgtaatacttttcatggtgtatgtaccggatgtataagcatttttcgcgctgaggccaccatagggctttggacgatccttattctctttgaaaccagtctcaaatccggtgaacatttgggcgataggggtgagattggagagtttatccataacttcctcagggacatttccatcccaagactttttcaggtgctccatgatgtaagagtcggagcggaagggaaagacgtcctgccgattgctttctaatttgatgagaataatatgtttgatcttgacgtctccgctgtgaagcacgtcacgtataggctccagaatttcgttctggagattgggaaagtgtagcggatctttcaacgggttgtagtgttcgtacaaatactcgttaggtgcggtattgttgaagtgacttatgcggaagggagaccagtccgggaaggcagtcgctgcatcacccgtatgtaaccaatcgaatgtcgggaaggagtccagagtatttttgtcttctagccagcggaaatcgcccggtaacgacaccacacctcgttgagaggacccgaacctgaggccgccaaaaggtgcgagaggcagagatgcggagaggaaactgtaagtcatatcgtggggacgaacgacacggaggaaaagtagaattgcgctgcacgatacgacaatagcgggcttgagcaatgcctgactcttccgtacaggcgggtctcggggcgcatctagcaacgataaggagtcgctgtcatcaccgagttcataatcatcgattgcgatttcttcataggtatctgggtgtggcagagcttgcttattcggacggaagtagcgataggtcgcggaaattactgcagcccagaccctcaggaaggctgcagtgacccgggatagatacggtgtggcgtagaatgcgcctaccaaaatcgacgtctcgagcaggatagcgacgaacagggctgacaaaacaagcgtggcggcgggcttgtccttgtggaagccactcgatatgcgccagtggatctccatgcccttgtggatataaaaggagatgttggcggaaatcattgacgaggcatatagactgggatggttagcgattcattcgctgtgtgaatccgagaaaggcctacctgaatagcgcagtgaatacggctgctatatcccgagtcgttcgccattcgtacgatcgggcgagactgcgcgcgcccagaatgagcaggatatccagcaaaaagaaggtgggaccccaggcgagaagggacaggaccgacagcgcattgagatgggcgtagatatggaaagccttggaaagcacgagggagatgaaaatgaccgaaaagaaatatgcgcgcgaggctgcccagccacgattaagatggtcctgaggtgatctggcgatttcgagggcgacgatggctgcagattcaagcttcccacgcagccgctgggaaagaccctctttcagctcccagggaggtctcatgatatatgtacaaaaaaagaaaactgcaatgcgtcaaatcatacaagaacgttgcacctgaattaactaaaggacagaattttccccatggatgtaatggaagaggtgtaggagaagaatccgataaggattttagaaataaggagagaccttcaagcagagagggtccggtccactttccacacgcctagaataatatccgacatctttgggaggcaaagatcagcaatgcctatcatcgtagggctattccgccgccaagactcccaaaatagcaagtaagcacgcgatggaaatatctgtacggagtacggagtatctcaggttgataacaaacaggggagacggggacaggtgccagttgtaaactgcctatttgggactaccgagctatttacaatggccatagcatatacggaatactatcccacgatattgcctatgttttacaacatagcaacatttggtctttcaaacttgctcaaggcgtttgtggagatcgccttggcaaagccacgtacgtggccccgtagcgatgaaccttgaacccgttagaattctcctggagctccacatctaccccattggcggttaaccttggaatctgatgctggagcttccaaggttgtcattatgttgtacaacataagtattgtaacatcaaagataactaagcactgttgttagtgaacctcgtgggatcggtcttatcactatctcatcccattcagctgaaggatgcacgatgagatttggtatagatcaggtggtggagcataacagtaagattaccattttagccacatgaaagctgcaaaggtaaagctgttcaaaaaataccacaaacatctaatagcaaaagtcaactcgttgggtttagggctaataaaacaaatagtatatcacccgaggaagccacagcctatgggctgtgttgcgatgccaataaggcaaagaaaattaaaagaggtcaccacaagaaacataaagtgacattggagcgtaggtaggatcatagtacagggcccgaaggatatatagttgaacttcagggttccgcatcaaggtttgtccacaggtaactggtgctgtgctgttcagtgccagcacgtataaatctcgatgatagagaaattaataaatcatggggaacacaatacaacatagggctgctattatgatcggcggtagggtaaagtctaatgagtaggcaggtgaaattggtgcctggtgtaggaggtagaagattccaaggacaaaaatagttatacttaggctatatagttaccacaatatgcaagactaatcatcagcaagagggatccccaatgggtccagagtccactgttgccatcaagagctatatcatcgcatacgatatccataccaaggcatcggacatcccccgagaaccccaccggcaccccgccgagcataaagagacaattaccggatgcactaaacctgggtaaagtacatctacccttgttagtgaagaatcagccaaaatgccagtctatcacatcggtgagttggatgcaggtatccaaaggatacgaaacatcactaaccaagctccaagtcctcttccgtctcaaatctggtgtcaccccggcccagatcgcgacctggaaggagacatgccagggaatggtggggaagattcccggtacgtgaaattctgaagttcagatcgagacagtttctcatgtaaatcctcacaataggactgctgtcgctgcagaacggtcccccgctgccaatttcgattccccgcgcccacggcttcgatatgggacttgttgctgttttggagacgcctgagcatgtggctacctatgcggtacaccctgctcacttggagtaagtcttcttcgtcgtcggattagtgaggaccgtggctcatttgctgacaccttggagggttcataaaatgcgcgaggagttgtgcgatgatactttggcctatgatctagagttctaggcgtttgatgtagtactaggtttcccataaagcgaagaaagttgcgaacagtccgttcaaaagtctcatttgtacatatcaaaccctaggtaggccccgttaatcgtagccactggggcctgcctagccaacccgtagatgctcgtaatgaaatgacaataacgccgatagaaggttcacctctatgaaataatcggaaaatagaggcaggtgggatctccaatccgcaatactttttgaatcccgctgattgaccgaatcagagaacaagaattaaagacaagacatttcaatccgccgaaactggataccttattccttggcatccaccttcttggcagggtggtcaccgctggtgccctcgtcctcacgggagcgcttctgggtgctctgcacgaccgggacaccactagaattgaagtcagcacttatacactcactgcgaatatcagatcactatgacttaccgggagtccttctgggcctcacggggagcctggaagccattctgttggtcctcagtgcggcgttcgcgccagtcacgaccaccatcacggtcattgcggtcacggccgccacggccacggctaccaccacgaccacgaccgccgcgaccaccacggccaccacgtccaccacggctaccaccacggccgccgctgttgcgagcgttggaggggtagacgttgccattcttgatctcctcgaccttctcgtcgcagtactccttcttgctcttgaagatcaggtcattctccttccactgaggcttcttctccagagcgaggaatgccttttgcttctcctcggactcaaactcaacaaagatgctgcccttgaaggtcttgtcgttagtgcggcgcagacggatggcgtttgtaggaccgtagggagcgaaaagagcctcgatgtcgagctgtgtagtgggttcttcctcgccaaagccgaagcccttggcgtagatggagcgggccatggaggcatcctcgaagaccttaacggccttggcgtcgtgctcgtttacggactcgggcagagggaccttgcgcttgacggcagtgtcgttctcggtgagttcgacgttctcggcggtcttgagggcctcgacaattgccttgaaaggttggaagcggcgcatgcgcttgaaagagtgaaggagttcaagggggacggcgttgttggcgctgccgccaaccttggagagcaggaacttgtccattgggaggttagaatcggaaaagtagaattcgacctacggtatgcgcgtcagttaagatctagtgaaggagcgtttcaaatggtcatacctgcttgcggatctgcacagggtcgtcggttacctctagggtggagggatcaaacttggcgttgttctggcgagggccacggccaccgcggccatcgcgctggaagctgcgggtctcgcgcttctcagtctggggctctgtggacttctcctcggccttctcagacttctctccgagcttagcggcttcggcgacaatacgggcctcatcggcatcctgagcaggcttctcggaggtgccttcctccttcagctcggcgagaacattctgaacatccttctcagcctcggcgttgacaacgggggtcttctgttcttcggtcatagtcgcgaattgtatgtggagactatttcagatggcaaaaaaaagatgataagcaggaagtttcgacgcgacggaaatgggtcaaagaaagcagaaagtgagcaaggggtcgaagggaatttatagccaatctcgggacatagggcacaatacctttatgggttgatcaatgcgctattcagaaaactattgcgcttgtgacaatatcgcggcggggagaatctgggaattttttttgagctccattggcgcctgaggcaggaactagtctgcaattggctagcgtggactcgaactattccctttttggcaattcaacgttctctatacattgtcttctattgtcttcattgtatgcaggaaaaaatggaataacaagagatgaataggagtagaaacaaagttctcgaagggaagtattgatttgactcatagtaactacattatgtactcatatttcgtcaagagcgtcaaagtcagatcgcaccttcccgaaggccaaggtgatttattgatatgctgactccctttcccgggggtttcgaacccatattgtcatggagaattctctcttgtcaaatatcacatatatcttcagttgaatattatttcctggtcgatgataatccgggtaccccgttcaccgcaggatagtaacattatcaggccctgagttgtaagtagcgtctgtcaacccccggattcccattatgttaacaaacgggatatatggtagttgttctccacatacaataccaccggacccttcacttgaagtgctgttttcaatattcaacaggctacaaagcaggttcgccaaatcaaaatggtaccatcacaaagggtttcgtgggttgagggaacctggccgaccaaagatgtattcctcccttctcctgggctcgagatgccatcctgatcatcctcaacagatagtatacctttcaatcgtcggtccattgatgcttgcagctctgttcgagtggtttctctggctcagcgccttcatatactgcctgatcaaggtgtggatgaaagcagaccattggactataagagttctcgctgtggttatgatcttcttctttacagtgatacggtaggttttttggacttcgggacctcattacctagtaatttcattcagggacatccactgacgaatacatagactggcattcctcccagtcatgctcgtgacactgccgttaccaccacaaatcacagttgacttaccccacaagatagtgcatgggtttcaaatgttcgcattctgggccttttctgttcttctgatcggcccatggctattctgtgtttacggtctcactaccaattcattaggcaggaaaaagaggattaagcgagtgcttgatgaccggacagccccgaagactgtggttgtgatgccagtatacaaggaggacccaagtgtcttgatcaaagccatcaactccgtggttgactgcgactaccctgcaaattgcatccatgtcttcctttcatacgatggtggcaaggtggacgagccgtatctccgggtcctcgaccatctcggtattccgatcacactagagagctatcctcagagcatcgactgcatttacaagggtgcacggatcacggtatctcgcttcaaacatggcggtaagaggcattgccagaagcatactttcaagcttatcgacaaggtttatgctgagtatttgaagacacatgacaatctgttcgttctgttcatcgattccgactgcattcttgatcgagtctgcttgcaaaacttcatgtacgacatggaacttaagccaggcagcaatcacgatatgcttgcgatgacaggcatcattacgtcgacgacggagaaaaacagcttgctgacaattcttcaagacatggaatacgtccatggtcagctttttgaacgatccgttgagtctggctgtggtgcggtgacttgtctccctggcgctttgactattctacgcttctcggcttttcgcaagatggccaagtattacttttcggacaaggctgagcaatgcgacgatctcttcgactacgggaaatgtcatctcggggaagaccgatggctcactcacctgttcatgattggtgccacggagcggtatcaaatccagctatgtatgagcgctttctgtaagaccgaagccgtccagacctttagtacgctcttgaagcaacgccgaagatggtttttaggtttcatcaccaacgaggtttgcatgctcactgacgccaggctctggaagcggtatcctcttctgtgtctggttcgattcatgcaaaacacggtccgaacgaccgcactgctctttttcatcatgatcatcgcactccttacaacctcaaaaaaggtggaggatcttcctgtgggattcatgggggtctctttggggttaaactatttactcatgctatactttggcctgcgtctcggacgctataaagcctggctttacccactcatgttcattgtgaacccgttcctcaactggatttatatggtctatggtattttcacagcgggccagcgaacttggggtggaccacgggccgatgctgccactgctgatgaccataccacgccaggagaagcagttgaacaggcaaaggagcagggcgatgagttcaacgttgatgtcgatacgttccgcaccagccttgtgcgacagagatctgttcccatccgcccatcggagaatgtggaaggtcgatttgcacctgccaagcagctgcttgataggtttgatgtcaatactgggcccgcgctcgcgcggatggtcggcgcgatgggaacttccgagaattcccagtaccagttaccttctctctttcgccattcaactgactctgtgctcagtgcatcgtcggattgcggctctagctcggttgctacaccacagaacgtggaaaacctcctgatgagtgaagaagaccagaagaagccctatcattctcgccaaggccaggcatcaacgagctcggtgagcctggatagccaaaatttggagaaccgcttgaatgatgctcttccggctttggtttctgcatccgagcatgataacctaggactcacccacccaccaggagcataccagcctggacgttttgaaaatatgcctccagcctacacagatcccgaaccaacggtgccgaacaaattggcagcgaaatgacctcaaatctcgtgacccacctcatgatattattgtctaacaagaacatacgttgagggtgcatgacgtcagtattcttcattttcttctttcttcctcttttttttcgtctcagcatcatcatagcttttcgaccacactattcttatgttttccagcgcaattttgttttgtctcacttctatagcttttagcatccaaaacacatcccagtctcatatgatgtaaccaccgatccaccgtagacgatcgatttttattctgccggccgcggtgggcggtgaaagtgggtagtctagcaatcgctagaagattcgatgagataccagaagagtccgaacgcccagtaaggtatatagaccagtaggagagagggaaatagagaatgaaagcactttctgacacattttacgttatccgtttataccccaaatttgaaattctttagttcggcgcctaaagagcagccagaccgcttgacacttgtcatcgcccctccaataatagtggagtggcgtgcaaattctcccctccgacttctctcacttttcctccttttgaatctcccatctccctccacctctctatctcctatatccccctactttcttccataatgagtgtcgtcggtatagatttgggtgcgcaaagcaccaaaattggtgttgcccgcaacaagggcattgacattgtgcgtattaccccacggtcttgatctggactcgcggtcttcttaggatgaaacatgacctcacaaattcgagaatttgcgctaactgcttgttgttgacattatagattgccaatgaagtctccaaccgtcagaccccgtatgtccccaaattccccgctatccactaaataactgacgactgatttgaattgttatagctccgtcgttggattcactcctcgcagccgaaacctcggcgaggccgccaaaggtgcagagatctcgaaccttaagaacaccgttggctccctcaagcgcctgatcggccgttctttcaacgatcccgatattgccatcgagcaggaatacaacacatgcaaactggtcgacgtcaatggccaggccggtgtcgaggtcaactaccttggcaagaaggagaagttcacagcaacccagttggtcgctgcgtacctttccaagatcaaggacatcaccgccaaggaattgcgcactcccgtctccgacgtcaccgtcagcgttcctgcttggttcactgacgttcagcgtcgggctatgattgacgctggtgatatcgctggtctcaacatccttcgtctcatcaatgacaccaccgctaccgctcttggctggggtattaccaaattagatctccccggccccgaggagaagccccgccgtgttatgttcgtcgacattggttactccgattacactgcctctattgttgagttccgcaagggtgaactgaacgtcaaggctaccgcctacgatcgtcacttcggtggtcgtaacttcgacaaggccctgaccgagcacctcgccgtcgaattcaaggagaagttcaaggtcgacatccacactaacggcaaggcctggacccgtaccttggtcgccgctgagaagctcaagaaggtcctctcggctaacgcccaggcacctttgagcgtcgagtcccttatggatgacgttgacgtccgcgctatgatgaagcgtgaggagctcgagctcctagtcaagcctctccttgatcgcctgaccgctcctctggagcaggcactctccgaggccaagcttcagattgaggacattgaccagattgagatggtcggtggctgcacccgtgtcccctctatcaaggaaaccctcaccaagttcttcggcaagaacctgtccttcaccctgaaccaggacgaggccattgcccgcggttgtgctttcagctgtgctactctctcccctattttccgtgtccgtgacttcgccgttcacgacattgtcaactaccccattgacttcacctgggagcagtcccccgagatcccagatgaggatactagcctcactgtcttcagccgtggcaatgtcatgccttccaccaagatcctcactttctaccgcaagcagcccttcgatctcgaggcccgctactccgacgtcgcggctatgcccggcaaggtcaacccctggattggccgcttctccgtcaagggcgtccaggctgatgccaacaacgacttcatgatctgcaagctcaaggcccgtctcaacctgcacggtatcctcaatgtcgagtccggatactacgtcgaggatattgaggtcgaggagcccattgaggaggagaagaacgaggacgagatggacgaatctaaggatgaggagcccaagaagacccgcaaggttaagaagcaggttcgcaagggtgacctccccatttcctccgccaccggcggcttcgaccaggccaccaaggaggcttggaccgagcgcgaaaacgctatgtacatggaggataagcttgtcgccgagaccgacgagaagaagaatgagctcgaggcctccatctacgagctccgtgacaagattgacggcgtgtactccgagtttgccagcgaggaggagaaggagaagttgaaggccaagctcacgaccaccgaggttagttttgaatcagcatctatcaataactattgtgatcaagcgtactaacacatcaatttaggattggctgtacgaagatggtgaagacaccaccaagtctgtctacgttgccaagatggacgacatccgcttcatcgccggccctatcatccagcgctacaaggagaaggccgaggccgagcgcgacgccgtccgcaaggccgatgaggaagccgccgctcggcgacgcgccgaacttgaggccaagaagaacgctcagggagattccgacatgcaggatgcccccgagggcgaacttgaggagcagtagatgcattcccacgatattggaatgatttgctgatgagttttcttatttttaagggttgggtatggaaaacccaattccaattgcgttttactctgatctagcaggttcgctaccaatttggatcggggtaactcgccgcgttatgacgaaaaggactttttttaaagagatgttccatggacctagagatttcaatcggcttttaatcgttggccacctttttttggccacttttttgttctaatggcaaacggttatgatgtagatcgttcttgttccctggatgtttatgaatagatgaaaatacactcaacgcctttgtcttcattgttgagatcctgtatgaatttgatatcaacatagctcattggcgaagcgacaggtccctatcgtaataaacttggactttatacagcacaccaaccctaggccaacagcctttagtttgcacgtattgtccttttcacagtcgtacatacagtcagcggctgattattcccagcagatatttataggcgtctactatatatatatatcacataacaattgaagtatacggagacacaagcggtgaatctcaaaagccaataggactaaagtccctaatggcgctgacactgcgatactcattgcaccactttctaccccgctctagttaactacagtgtactctgtaattaatacatcaacatgactcgggaaccttgggagcgaccatatataaataaatcacccaaggatatggtgatgcacagatttgtatggcgtgaaaagcttcattttatacaaccacgcagaaccgggcacctgggcagcgtacattgattactatgcacgtgtaatagtaatttaggtattttaagttttctgctggtaaaatacggcatttaggcatcaaatacccccaaatctagggtttgaaccatgatataccgcttcgtaactggccctatcatggctctatgcacctcaaagacggcctgccgcagatacgatagaggtaaggacaatattccacagtagaagcaaacttcttatgacagtcgcatcaagcaaagttaagaatcctacccagcttgccgtttgttattgtgtcagcctttcttattcccctctcctctcacctgttcctctcttgatcttctccctattcttcttcgcctttttgatcagtgatttctcttgcattgcaccagtcctccaagttccagtctatcttgagagatggcgcaagatcaagataagcgaatgatcctccggcttctgcttgaggatttagatgatctcgaaaatagacagaaaggaaaacaaggcacaggaaaggaaacagaccttgaaattgccatctcatgcttgagggaagatattcgggctatgcaaacttccatcgacgacgagatattggcgcttagcacgagtactgcaatcgccactgaccagaagatactcgcgtctcttcttcgcgaggaaagacttgctaatcaggaccaccaattcgctctcgccctgaacaaaggaaccgctaatcgtacgaatgccttggcaaacgatatcgtatcgtcagatgacgatgacgatgccgtttccattgtcatgggggatctcatgggccggatgtctgtgagtggcagatcatctaacaacggggaaggctcatcatacatgcgttcatctcgaggaaccaacttcatgagtgaatgtgcatcctgtcttacaaaggtcgagtctatcgtgttcaagggtgcgtgcggtcacgagttttgcctcgactgcgtaagacagatgttcctcggtgccatcagagacgaggaattatacccgcctcgttgctgcggcaatgtcataccgcctggtgttgctttgaggatccttaactacgaggagcttcgaaatttcagtgaaagagcccttgaatggaccgcaaaagatcgcctctattgcgctgagccaacatgttcgaaattcattcccccattcgctatccgagacgagcacggcacctgccccgaatgtcaccagcggactcatgtaccatgccgttccctcgcccaccctcgcgtcgattgcccaatggacgagactcttcatgctgtattggaaatagcggattctcaaaactggaagcgatgcttcaattgccgaaccatggtagagttgcacgttggctgcaaccatataacatgtcggtaagtgagaaacatcccctacaacaaacaatatcacagtacatgagaagaaactaatgatttgtagctgtggccgcgaattttgctatgtgtgtggcttggtttggaaaacatgcgagtgcccactttggcacgaggacaggctcgaagaagtggcaaatcgggcggtacatgaggaggtcccggccaacgccaataaccaagtccgccagatcgcatttaaccggatagtcgatggcctgcagcagcatgaggacaacggctgcgagcaccacaggaactcgcaatgggttttccgtaagactggaagtttgcagtgtgaggtctgcaaccattatatgcctgagtacattttcatgtgcagaggttgccggattcgggcttgcaaccgttgccgaagacatagaatgaggtagttcgctgcttttgcacggcatctcgtgaaagacagctgagaggcatggggttactctgcaagtcattcataccagtctgcttggtgggagtagaaggaagggtgccattttagactgtcaatttactagatttgtctttgagcattggggtcctcgagccgatctacttgaacgaagatatttgctggcagtttgggcgtaattcttattggaaatcaaaacgcacttttgcgtcattcgactagcggagagcggagataatacatgttaagatttgatgtgtatagcacttctatcaattacctcgttagtttctgactttgccttactgcctgaggcattcacattcttgatatcacgtgctagctccggcttatctccgtgctgacaaaacctatcgccgtggaatcaggtcgaattcgccagcgcctgcctattcgggccatataagcagtttccttatcgcagttcttcactcacgagctcttctctcacgatttgctgccatacgatcgcacatatacttgtacgctataatggactctcccaaggagctaaccgtccaccaccatgggaccgcgcatatcattcaagttccagactcggcaacattacaagacctctcctccgagatagagcgcgtcctgaacattccggtcgacaaccaaaagctcctcatagccccaaagcctggaatgcagaaagcgcctttcccaccaactctcctcgacgccattctccaaccctcctccccaaaattcaagatcaccctcctcggcaccccggccaaagcaatcgccgatctgcacgaacaatctgccagcgaacaacgacgacaagaattacgtgcgtctgccctaagtgccgcaagacgcaataaacgaacaccgtcgtcccgtagcggcggcatccacaccatctcatcttcaagcaacaactacaccttccaccgcctcctcccactatcatacctccccaacccagatcgctccctcgacttcctcaagcgcctccgtgacgacccaggcatccgcgccgcaatgacaaaacacaagttctctgtgccgctcttaacagaaatgaacccggcggaacacacgacgagcgagtcgcggacgctaggtctgaaccgaaatcaaggcgaggtaattgagctgcggttgcgaacggatgcctatgacggataccgtgattaccgtactattcggaagacgctgtgtcatgagcttgcgcattgcgtattcgggccccatgaccgcgacttctgggatttgacgtcgcagattgagaaggaggttgatcgcgctgattggaaatctggcgggaatcagttgtctagtcaggagttttataatcctggtgattgggatagtgcacaggatggggaggagtttgttgatgagtgtgggtggactggtggggagtttgtccttggtggattgcaaggggactcgactggaggccgaaatgctgcttctggcgggacgttgtctcgtagggaaatcatggcgcgcgctgcagaggagagaatgaagagggagagtcaggccggaaagcaagatgatgccaagtgatatcatggcacgctatgcttttcatgatttacgagttcttgcttttgacctacatagccgttgataccatatttttagttcgtaattaactcatttctgtacattgcagactgtatattatcacttaattataccaatctagatatttacagctgctcgttaacaaagagaccagccataccctgaccagttccaatacacatggaagtgaccagaatcttgctctttgtgcgacgagcctcgctcagaatggtcgcgatctggcgtgcacctgttgcgccgagagggtgaccaatggcaatagcaccgccacgagggttgaccttggcgtggtcaagaccaagggtattgacacagtagacagccatagaggcgaaagcctcgttgatctcgtagatgtcgatatcattcttgtcaagctggaacttgctcaacagcttggggatagcggcagttgggccgatacccataacgcgagggggcacaccggcaacggtagcgccgcagaactttgccaggataggctggttcagctcgatagccttggagcggcgcatgagaaggacagacgcggcaccatcggtgacctggctggagtttccaccagtggacttgtcaccgaactgcgggaacgcagggcgaatcttggaaagcgactcgaaggtcgtaccgggacggataccatcatcacgggacacaatcacctccgtaatctcgccagtcttgggatccttaaccttggtaggaataggaacaatctcgtcagcgaaccaaccgttgttctgagcagcctcagcacgacggaaagactcggcagcatatcggtcctgctgttcgcgggggacatcgaagtccttgccgatgttctcggatgtctggcccatgggctgcatgcagtcggcagcctcctggttgcgcaggacctcctcgttgaatggcttctccaggcgttcgccaggagcggacatgagctcggcacccatagcgagaccgatgtcgatggcgcccatcgagatctggttcgcaatatcctgcaccgccttcagtccagacgagcagaagcggttcactgttgaggcaccggctgtgtgggggatgccggcggcaagagctgcggcgcggaccatgtaggcggccttgacttcgttgacctgtctttgggttagaatatgccacctatgagtttatggaggaaggaaagggattggacatacgttgccgaggcagacatcctcaatcagagcagggtcaatctgtgacttggccagagtctccttcaacagggcgtagaggagatagtccaattctgtgtccttgaatccacccttacgcgcccgggtcagcggtgtgcggattgcgagggtgatgaccacatcgtcggggttcttctgtgtactgtgtgtgcttgttagactcatgacacacaactgagtttgtctgaagacttacatagcagcgaggccgttggcggcgccgggcttgaggtggctcaggagtgagcttaaacgatcagcagccattatgtatgaaggtttagagattggactaatatatcgtcagtcttgtgcttctcttctttgttgaagacgccggtactggcatggaagttttcggtcttaatgcggggaagcttccacgtgcggagattcgaggagagtgaatgcaaataactcaggcactgggagaataacttacagactgtacagaattaggatagagacgaggaataattcaagcaaaggggaggaagaggagagagttaaaagaagtatcaagaggaggaaggtcgacgttccggccgaggctgccgaggttcatttcgcctgtcaggttatccggtcaataagtatctagtacttcagatttgcccagaactactaactgtaggaagtaccaaatactttaccaagatctatttccagttttatggggttggcttgtggagatgcctaggtaactcggtttgtccgagtattattggaactttggaatatactgtaacataaaccattcatttctagtgtctagataggggtaaaccatgctattatttcgttagttctggcatacttggccttctactcgttgcccgttctgggatgcgatattccgccacttgttcgatcgagacgttgtcgctcacgtcgacagtaatcagttctaccgatgtgtcgatggaatctatatgtatacactcggagagatagctatgtgttgttataccttcttgatgatcactaatatgtgcccaccattatctcctggcgcagccaatcctcaaatcttccctcgtgagctttggggtcagtgtcttcccagttataagaaccagtgtgatagttcaaaatctcgaaatacctatggacgattagcacagatcaatacgccgcagatggggaaaattcatacattttgctcttccattcatctgtagtcatttctgaatccaacaaagacaagtcaatttgtttctcacactcgggttcgtcattagagtccgaatagctcgaaacgtatggatcgcttagggcatcatccgccgtgattctcttttgtggatctatatccagcattttctccaagagatgaacggctagcgaagtcagtatcattggaggtagataaatcaggagcatttgatatcaatcaagatctcaagggcataccttcagggtcaacatctcccaatgtagctccaagtgaccggggttttgtttcaggtagagagttcacaaaatccatcgtctataatttgtagttagcatcttcccatccgtccctaaaccggccgtttagaagtcgatcatacaatgtcgctgtagactgtctccataatctctctgggcggcttcccaaagatctcagtgatcagtttgaagtgatgcacattgtcccttgccggtaagaagacctttcctaggagcatctctgccagaatgcaaccagtgctccaaatatccaccgcgtaggtgtatctctgccaggtcaacatgatctctggagctcggtagtatcgtgtggagacatagccagtcatctgatgatcttgttctcgagctagaccaaagtcacaaatcttcaagtcgcagttctctgtgatcaaaatgttgctaggtttgacatcacggtggatgacaccagcagagtgaatgaattttaaccctcgctgaaatagtcagatacactgatatttctggatcactcaggcagacataccagcagttggtaggtgaagaactgggtgaacctgtcctccaatggctttgaccttgattggatcaaatgatgaaggtctgtcatgcaacaatccatcacaatataactattccaacatggttagtatgattgaaggagatagacaagtgatttccgtacagatcttccgctggcgagatgaagatgtccgtcatgttgatcaactattggcgattagtgttgtagctcatacttcgtctcttttctacacatacattatcatgttttaggttgttcatcaaatgaacctcgcgatatgtgcgtttgacccgggaagagctttcaaagggtttccctatcttttttatggccatcgttcggttggccattgaatcatgcgccgagctgatactggtggttagtggtcttacagcacgaatagaatatacgagggagataccagattaccccaaacgcaccaacacctcgtgctttcaagtctgtgtatctctcggtagtttgaagggtggtgcccatgattttatgtgtgatgaatgtagccatgcttgcaaggttgcatgtgtgaaagttgaatggattgacggaatagtgtaagaggacaaaggatccccggtatactataaacgataccgcattactataattagtcttccaagatcccaatgttcttcttcccaggtctaggccgtgtggtcgttacgtcacaacgtggatgttcccatgtggttgatccattgtggttggccagttggccgttttacatcttgatttccacgtatccatgccgagccggttataacggattatcatctacatagtatatatgctcaaagtagtggacgtcacctagctcgatcccaatcaccagactctctttcgcaattgcgtcaatcatgtcccaggtgatcgaacgcgagaggcaaattacgatctttgccttcgaatttcctttgctgctcggtacaaaatgaacaatgcctttctagaagtccagaataattggaaatttaacggaaccattggtacttcaattgaaatagagcataaatgtaccttgtatcgcattaacaaattgcagctaagctcaaatctaacgccaaacaccgaatactataccgaaagttccccgagccagtaaagcccacccattgatccgtccttgacggtccgagtgaatcagagcaactgatgtccagcatcctcgttgctaattacgctacccacgtcagaccatgccggagtagccaaaccaccaacagatcgcccatcaaggtcactaagagtgccatctgacgtttcatcttcaaatcctccgacatggctgaaacttccagcggtcgaaggagcggccgaaatctcatcgtaggactgaacgctctcgtggccgaaaccatctagctcgacaaggtgatcactttcataatttatgttgtttgccgcatcagggtgcgcataatatacctgctgatggtcttctgtgtggctggaaccagaggcagacaagggagagttaggagagaatggatcgaaaaggttatccccctcgggtgcttcagaccgaggcgtaaactggatcatagattcggaaggatggattgagggagcgggtgaggggatgtcgacatgcagctgattccgacccggtgtagttgaggattcggcctcagttttcttgacacctcggcggaaaggctccgaagtccccaggtcaactcccgttgagttagcagtaaattcttcgttggaccgagcattgtattcgtggtctttttgtatacgcagattgccctcgctgtcgacgagggtatcaaagctattatgaggctggcctggctggctggacttccgtcgcgattcaatgaccgattcaatgagctttccccgtcgtatgatctcctcacgagcaatccgtctgcgttcttcggcaacctcgccggtctcctcagtcatggaaatgtcttgccgcaacgctatgtcttgaggttggatctcatcgccgaggttgtgcagagccaaggcgatcttgcgccgcgagttggttacccattgttgaaactgaggcgactcatacacggcgatgccagctgctacaagcacagaaacagtaatgatgattcctgcatgagagtttagcctcatcgtatagagagtggggaactgataaggccgagtacacggctcggatgatccgggagggaaatgtagaagtttagggaggtagaggaccataccttttgcaagtggtgctggcataatgaacccgaatactgtacttgtctttcctaaaagtgttttcgaaactcaccaccgtcaagcggagcaagatgattcggtgatggatgcctggaccttatccttgcattatcgcgcgtgaccgggaaagcccttatcattggccctaagtacacaccgctttgggtaaagttccccgcgtcaaagagggacgtgattgcaagctcccatctcttgactcgattgatgtacaattgaacttgaacgatacatcatgtctcgccaattttcgcaggcccaacggccgttgtccctcaccgaggagcttgagaaattggaacagtccatcacccttacaatgcaaggtagggtagagaagtaaacaaaacagtccagcagaccgctcatcgtcctatcttcgaacagagatcgaccacaatttcagtgaagctcatcggatagtcactacgagtatactgcctctggtacagcaatataccgagcattcacgagatgtctgggaaggttccaaggttagcgccaccagcttatacagctatagacagattggttgactccctttagttttggaagcaattcttcgaagctagtgccaacgtatccctatccggctacgaagaaagaaacaccgatgaagaaacgacgcaggaccctacagccacggaggaagagttgtccgccgacataactcaaagtactaccctcgacgagacaatgtccaacgagacaccatcttcgcagcgtcatgaaacaccccgccgcgatcaggcagacgatcttgatctaacagaactcggcatttcttcgcacagcactccgcgtgctccgggcggccaccaccaggccgacgacgacataacaacctcctcaatggagtactcgtcctcttacgagaacctaagaagacaagtcaatgaatccgaacccccattcgacctcccagagtcctcgaccctcccatccactccaggccgccagctcttcttcccacgcggcgtctccgtcacaaccccgatgtcatcaccattccttccacccgcggagccatccacccaagaccgtcgataccagaagacctcagacccggtactgcaccaaatgctcgacaagacataccgggtgcaagccacgccgctcggaaagggatttcgcaatgtgggtggcggcacgaacacccgaccaaagttcaacatcaccccaaagccggccgagtctacctccaagtacagatatgacgactcgccgatttccagtccagagccagaggcaccacagctccactcggaagtcttctcatcccccatcaagggcatcgataccccgggcacgaaccgcaagcgacggactagcagtaatcgcatgcgcggtattcccaggcctggcatgagtgttttgacacctgctaagaagtctgctggtaagtcagctatgtgggatagtgacgacgatctggattacgacgatgaggaccttgggccgagtcctcctaagacaatgcagtttcacattccgcagagccggttgatgcgaacgcctggtaataaatcacttgatcctatgtttaatactatatccatgctaacccccttcgtcttggtagcaagagaggcttctaagcgcattgtgaccgatttgctggctacggctggagctggggagattacagatgactttagcgacgatcaaagtccaagtgtgatccgccgcatggagcacttggaggatgaaactttctaaattcgccaagaaataaggctgactataggttcttcacattgaatatgcatggctttttttcggctacattccccacattacacgaatacccatgaatattactatgacgtcattattgacgaatgccagattcagtcttcagatatctattagagtagagaaacagagataagagggcacatcctttagtataatcacacaagtagacacagtaaaataaatgtcactttttggactgagagagcccttgcggcatgaacaagaagaaaaaacgcttaagaaatcatgtacgggggggatgaaggtcaagcgagcaatgtcatcgccccgtcccatctatcattatggtccaacagaggttgcgggctctcagtatgaaatagaaagaaaatgggcagcgatgtccgcgatggaccttggccaatggtggtcatggaggggatgaacaagaagcaagatagtgcatctaggagctcttcttcttgttcttggactcggtgtcctccttctccgtcttggagtccttctcatcattactctcctcaggcttcttcttttgttcgtcttcagcagccttctgcttctcttcatgctcatagagagaaatgtgcttagagctcaagcgatcctcctcagcagcaaccatatccttccagagatctccctcattattcgaggcaccctggtgggtaggctgatcctcctcaacatcctcaaaccgaggcttgcccgacggattcgccttgttcttcgcgtccagcaagccacggccgcgacgctgatccgagatctcaaacgcagccgaagcgcacagcacacccagcgtcagaccctgggcatagacacgagcctggacgagcttctgctggccgctgaggccgggaatgcgaccgaccagggcgaatgagccaaccatcgaggcgagccaggtggcggtgataatcttgtatttctcacggcgggcgaaggcagccgcgcggtcggtgaagctgagtccgcgggattcttcggcgcggaggcgctcttcgcgattctcgtaccatttgtatgcggcattctgctcgttctcgtattcgcgcgaggcgtggtcggccgcgatgataccggcgaaagtacccgaggacgtcaccaggaaggccttcatggggacggttaggttgttgattgtgtgatagcgacgtgaagcaagtaggacacctgctattccggcggcgagacccagcacgccaccgactgtgccgcctttgaggacggagctattggggggttatcagtatgggctgttcatgggaagaggttgcagggctttcgtaccggtagtgggcagcttcttcttctttagtaaggatcttcattgtgtaaaatagtgtatttctttagaatgaagtaaaggaagaaggtgaaatgttcgatataaaaccaaaaaagcaaaggccggatcgcatgacgtgggatcgcgggatctgctctttttccggcgttggcccccggccatcactcggtcttgcacggaactgacttgccttgattttgtggctttttttggctttttttcttttctgacctatttagaatttaattggcttctcattggctgtttccaatatgaatttcaattgataaagattctgcttattccactcggaatgcgaaacgtgacacactcccaaatccctggccccgattgatcccgaaacgcccaaacaccgcaaatagtatctcacataacggaacaggccactgccattttgaaaagaatttactggtaccaaatctaccgacgagacgccttgcgtgcggcgacctggcgggcttgcatcttgcggaaacggtcctcgccactggcacccaaggggcgcgcaaactgactctcgcgcacagctgtctggcgcggaaccacagtatagctgacgtttgtacgatcgacgcgagcacgattgagaaggcggggagggagcatctcgagggcgcgggcttcggctcggatctcctcggcggtgggaggtgcgcgcctgacgactttcctataggggtgttagtgcgtgatagggcggttgtaaaacagtgaacatacgtaggatcataatcagcctcctggtagacccgcttagaataatcgtcgctgcgctgcagaataggtcgtgtccactccgctagcaacttctctgccatttccttgatgcgacgctcggtgcgcttgctcttggtgtagaaaacaaccacttttccaatgccactggcaatcaaggcatccttgttgataggaagtttggtaatggcggtcaataggtcgcgctggatgttgtaggcgggcatcgcgccatcgtccagaggctcgaggaagaatcgaacggcttctagtaagttaatctctggatcgaccaaggcgcttgtgtactggttgcgattgaggagcatgatgacttcagggagcagcttaagcttgtgcatagccggttttccttcttggcggtttatcgcatccatttgcgctgcgtgggtcatgcgcttgcgcatatcctcaatttcagcatctgccatagattccaaatcctaatatgacagtcagtaaacgtaggtgggtacctgtcaccaggcgcaacacatacaatgccgtcctgcttgcggaaacgtctcttcgccggctttttcatcgcctcgtccatagcacggtcaagggctcgccgacgtcctgatgattgaaaaccagttagtacaaattgtgtgcggcgggaaaggagttgccagtaaagagtagcacatacgggtctccgggtcaagggtctcctcgtctgtctctggcttatcctcgcgctgcttgcgctcacgtcggcgagatgagcctccttcgtcgcctccctcatcagctcgacggctctttttctcgcgacggccctccttccggcgcggacgactctccccatcctcagtgcgcttgcgcttgtgacgaccaatgagtttcaagttatcttcatcaatagcaagttgcgggcggtcctcgacatcgacattctctgggtcgaagttgtcgaattgtgcctcgtcaacctcggataaaatagactcgtcgtctgaaagtttgtcgtcgtcgacttcgtcgtcatctccaccgtgtagctcgtcatcggcattcaccgtgacctccttagtctcagcagtaggttcagtgacgttctcaccctcgttgtcgccaccagtaaccggggttgcggcttgttcgaggacttcgggttcgggagaggcggcaggcgagacagccttgcggtccggtgaagcagacatagcggttcagatggcaccagaagcgaaggggtagattaagaacaaagattcaaaggcgtagaaatcagttaggggggtatcaaacaggtccagtacgttatctgcctaagtgatcccgacggttctccgcaaaatcaaccggttttctgcggattggaccaattcagatgcggtgtggatgtagggattgaagagaggagccaacaagctgctcacagaattagtcgatagaatgtaaatggatagagagaggggagacagtgaggcaaaacctcaagagaaggagagcggtggtctgtgctcccgtgatttatttctccagtccgacttggacatcctcgtaactacaactctcacaacatctattatctgaactctctttcgttccttacttctttatcatattcaaaatgtttgcaccgggtatgttcccagttgtatatctcttcgctctagcacactcgaactaacaatataactctctaaggccaagaacagatctctaaggaagagctcaaggtcagtttcaagccatgacctctgccctaaatagcatctgatactaatattatttacaggctggtgagattgaggccttccagaccgtccagatggctattgccggtggtttcctcctctacctgtgtaagtcgagtatctgaagccttgaacacctcgagacgagtcagaaaagagttggggctgaaaactaacattgtcatctaatatatagcccccttcgccgtcgaattcgtccgcaagttcctttaagccggttggcccgtcttccgctcctctttcttgctcttcccggactgtaatcgacgaatcgctggttatgatttcccgatgatatgcaggagaattgaacatttcattctttcccctctggcatagctttttctactgcccaaatcggacaggattgagcatgggcacctaattcatggaaagctcttgaagctcatatactacacattttgggtctgctgggcagtgtcagttggatgatgtattactattgtgcataggctcgttgtcatttgtggtttatgagatatagagcaaatcaaaataagatattgcattatatcggaatctaggtctcgcctggctgtggcaaagtaatgagtcaacatagcagagtgggggagcggtttaaggcatagatatacactgactagggactatctgtggatagtacatgtcattacgaagacttggcgagcaatgctcattcaaagacacccaaaatggaatacggagtgttcagcaagaaatttgtattcagatatgcattacaatggcctgatccccgagaacgccggtaccccgatgaccgtagacattaagtccaaacatgtgaggaaatgtgaggaaattgagaatcaaaatagcacatagaaagtcatagagcaatgctctcaattgccaattgctttctccaccgcgttgaagtcgttcttgatggactccatctccttctgaagatactgaatctgagagtgataatcgtccaaaatctggtacatacggttagcgaactcttccgatactgaggtttcacaagctcgggactgccgaaccttctttgctgtcttcaatgtctgctcatcaatgtcatcctctggttgtgtcacgtttaccccggcacgatcgatttccacttgcaatcgcttggagtgttcgtggatggccaacatacgggcccaaatttcttcagcacggccattgagagacgggtcgaaaacggcacgttctagctcaacaagctttttcttcaactgttcctccgcttcatccatggcataccctctgttgcgaaggatctgtgtcttagccgcaagggagaggcaccgtttgctcagaatgatgtgtttccgacggcagtcggcgatcttgacggaaaggttgagatcatgcttcgagagaagcccggtcaagcaatcgttgatctcgtgcaggcgcgactgcatcatagtgaggaagtccctttgtcgctgcgcgcgcttaccgagttcccagaagcccttgacaagcacagggacatatcctggacccggtcgcttgcgcaaagcctcctcccactttgcatcatcgtcctcgggacccggttggtagaaaggagcggcctcctcgccgacattattgtacaggtaggcacggaatggcgagctttggctgggcgggtcccacttatctttgatgatggctacttgcataggaacagtccggtgcactagaaagtagtcttgtcagtaatggttcgtagtgaatgattacgcaataggctcacccccagtgatagcacgaccaggagaccaaaggcttgacgatagagaaggctgttgctgttggggttgtggggttgtcatcgtgttctggccgaattgcgattgctgctggccgaatgcatttgtttgttgttgggggttggaacccagaccaccgaaccctcctagtgcagctggttgttgtgcttgctgctggcctccggagaagaggctaccttgcggtttctgtagcgaggagccgaatgcgcttccttgctgctgctgctgttgttgctgaggcgcggcgcttgcgccgaacgcactcccgccaaatgcattggttgctgtcgcggctggctgttgttgggtctgcccgaatggtgtgctggtgttgggttgggctgcggttgtagaggtgccaaagagagacggcttcgctgcagtgttgccgaacatgttgttggcctggggctggtttccaccaaagagagacatgatggcaatcacaaagacaaaaaaaaaccacgatgaagagagaccgcgtcaatggatcaataaatcgctagcgcagctagattaagagcgctgaagggaaatagaaacaagttcaaagcacatagtctagagactggggggtgacagtcgaaggtgagaaagctgaggggttcttcgatggagctcgaaggccgagaaagatgagccggagctcgatttgtttgtgtcacgtgatgtgatattgttcgcaaaccgcttaaatgcatattgaaagaaagagttgaatcaatagtgaattagaattgctttattgttctatgttattgtcctaatggatttttcttattgatatatccaataaacaaaagcaacaactcatatacgccctattccagcaccgcacctaggcacctcaggtgatatattacgctgacctaagcaaaatccagacagccaatcaccgacgagccaaatttcattccaccgcaacccgcagctctcgactatcgatctccaagtctcgcctcaattgcacctctttcccctcacagtcgttctgacaagccaccgtcgccatggcccaaagagatgctcggtatgtaccttgatctcaattgcttcctctccgtatagctcaatgtgagacgctaactgctatcccctccgcgcacagctttaaccagactgtcctggtggacaccacgcccatgcccgatcacattcccaaggtggaagagatcggtgccacatctgcacccctgatgagtgcatcctttttcattggagaccgctgcaaggccttcaatgacgactacatgaagtgcaaggacgaggccaatggccgcggggagatcgactgcttgaaggagggccggaaggtgacgcgctgtgccgctagcgtgtatgttgctttgtgatttacctttggatcgagaaggagatattgacccgtcacagcatcaaggacatcaacaccaactgcctcgaccagttcaaggcccactgggaatgtctcgagaacaacaaccaccacctatgggagtgccgtaggcccgagatgcagcttaacacctgtgtcttcgagaaattggtatgatatacgccttcttgctctcgatcgcctatcacctcgcatccattatatccgctatcactcccggactagagctaacatacacttctcttgtttctttagggcttgaagaagaccctccctggcgctcccgagaaccaagttcctgttcacttgcgccccaagcaaaaatacgcacagtaccccggtccccagtggtaaacactgtccctgtttactttgtcctctctagactcaccctgattgcacccttatccttccctctcataatctgggcaccgtcttttttctatagcactgttttatttggatgctcgaccgtaaatccggtctatgtttgtgtaaatatctcttggcatcatgaatggttacatgattttctgctcgatctccaaatctccttgccttgctcacatggcatgcacggggcaatatgttttccaacctattgcagtgtgcaatagcatattctcgagttggtaaagtacggactctatagcccgctggctctcgtgcaccctcggtttgatgcctgatttgttcactgagcgtgacctgaccgatccgacttgcttactgagcataaacccaataaaatacaacgcgataggcccgtccaatgcagtccttcatcaacgctcttgtccccttaacaaagggctggcgtcatctatgtggcggtccagccctggttgcttcgcctctaagtggaagggaaatgctgctatcccgcggctatggcactattcagtctcccatccacgataccgtttctacatagttgcaagaactatccagccctctggttctacgatatagacgtcaggccttttgctggatctgaagggtgaggtagaatactatggaactaccatattccaaggtttttgatcgagttctcagtacttgattcctggagcaacgagtgtataacggggatatacatgtacatttctacaaatcaagcccgtcaaccgatgtctagaaaacgacgcggtctacacacttaatcaatgactcgatgtatatatatctattcaggtctacattgttctttgcccttcaaattgccaaatttttctcactttattgtcaccctgttctcactttgttctcaatagacaacctcagcccgcccttctacagctatttatttcgctttcttccagttctcatatcttctttcacagacagccctctgtgatttttattccttgcatctacgctatgtccattgtttctctggcatatcgttcgccactttcttgaacagaagacttgacaagaatcctgactcctacgaagccctcgcagctcgcagtgacctcgttgagtctgccagacatccagaagatcatcggtctcacctggttgcagatgatgagttcgactttgttacacctgtccccgtcccgcaaggctcgatgtttggaaatatccagaagccccattataccttcggctcaagtgcctttgggcagccccagcagcaacaacagcagtatgttagctcgatggactgtacaaataaatcagctaccctcagttagaactctagttggaaaagccggaccgcactcatggcgcaaacgaagccagtatccgctgcaagctcgaactcctccttgtctgcgatcacgatctattttccatctttgaacaaatctgctcgacccttgaacattcaaatggaatgtacatgggcgtatagctctgcgaaatggaaggggaagacatcgacttaaacattgctatcatggagaccaagagacctaccagttgttccgcagggattccgcattcccatcccgacccattgctgctctggtccgaatatgattgacaggcaactgattgccatgaatgtcgatgatgagtgcctctcattgtcataccccggcggaacttgcgaatatgatgatgcccgatggtttcactgtatggcctcttatgggatcaacagcgagctttaggaggccattatggattcaaaatttcgacacatccgcctaaccgaaacttgcaagctctggcttcaggacactattcacttacgataccgggctacaaccccctttaccacggaagaactggggcgggtcacaaggaggttacaaaacatggctctagagagctgagaaacagaaaatactggaggcttcactgtgctggcggcttcactgtgctggtggcttccattggagtacagaagccgtttgacaattccgaagccaagaggcaagaagcttctcgtgagcgtgatcttggcatggtatctaaaggcgatggaggcgtcccccatacacgcccagtcacacaccagggagggatctggggggttctctattccttgctcttcttatttttacccatggcccttcgctagtattacttgatcgaaatacgagtctatctatctaggctatgacccaattaatagatagtgagacaaattctctgcttctttgatatcctaacccgtagcccaaaatctgaaaggagtcggcagatgacagagtattatgctcttttgggtctggactgagcgtgctaggttaggaaacccatatgtaggtaaccattgcaacaaataaactagccacctttcaccctgacattcctctgcaggaaagcttgtatatattggctctagattacccaggcttacgcatgcactgcagagtctcaccgtgtatataacatgttctggctatgttttccttccgatctctgactttgtccaacatatgaccaccgagtaatatgggtttttgttcttgagagctaacttaacctttagagaattggtgatagtatacatgtaggcagcgtgcgtgaaacataaaggttaggtgggatataagttcgcttattcctaacgtatctatggataatattgctgggcatatcaagctctataattctattacgattagctttgagtagatctgatctaatgataccttctcaaaatattgatctggaccgagcgcttttccgggctagtacaaaggcttagcatcaaccgttctgcagcgtctgaactacaatgacagattgttaatcgttacattctataatccgaaggaatccataatcataatcatccttcacctgattcgattgcaggggtttggcctgttggtcaatgtgtgtaattgagccctaattccggccctccgatatactacctggtgtaactatgcctttgagataatccgaaacatatctaggttggtttctacttaggttcaagagtccgcttgtcacagaatgcatcaacagcattgactggtcattggagtgtatctgaagtatttcggaatatagaaagcatgtattaaatccggggatttagacccaaggtatgaggaaattacaaagagagagaggccaagagtacgcttagatctagatgcacgaatagcggacctccggcatctatctatagatacctcgagaggcataaatgcaggtatcaaactctccaccagtccgtgcatgtgcgacaggaaaacaaggatatagattattgatacaaaagccgcacttccttctctaacgactcttcatatcgatgtactacttacatctatagtctgagccatacacgcaggtagacatgaagtcggcaatattcttgattctatcattatggagaggtgtccatcacgtccaagcagcggccgtgttcgcccacttcatggtaaagcccttcaactacgatctatatctccgctaacctccaccaattccagctatacaactcggagaacttcacggtctccgactgggaaatcaacatagcagaagcacaaaaggcccacatcgacgcctttgctctgaacatcgcatacaacttcccaacaaacaaccggtccctagcgaacgcattcaaggccgcaaataccctgagcttccaactcctattctcatttgactacgtaggcaacggtgcctggccagaaggcgaggtgatcggcctcctccgaaaatacggaaacaacccagcctactaccagcacaacggcaaacccttcgtctcaacctttgaaggctcctccaacgccacagactggaccacaataaaaaagtacacagactgtttcttcgtaccggggtggtcagccctaggcgcgaaggaagctctcgccgtcgcaccaggcattccagacggcctattctcctgggccgcatggccggaaggcccagacccgataaacacgtacatagattccacgtacatgcagtggctcaaagacaccggccacctgccgtacatgatgccagtctcgccgtggttctacacgaacctgccaggctacggcaagaactgggtctggaacggcgataacctgtggtacgaccgctggcagcaagtgctatctctcaagccggagtttgtggagatcatctcgtggaacgactacggcgaatcgcactacatcggcccgctgcatgagggttcatatgcgaccttcgagatcggtcatgcgagctacaactacgctaccggacacccccatgacggctggcgtgacttcctgcctttcatcatcgatgtctataagggtgcacggccgaatgtcacgactgagggcgtcacggcttggttccggctggcgcctgggaaggcttgtgccaacggtgacactatgggtaatacgaagacgcatgggcaaaaggagttcccgccgacggacgttttgcaagatgaggtcttctactctgcgctgctccggaacgctatggatgtggatgtgtcggttgggatcggcggggtcgtgcaggatgggaagtggaagaatagaccacacggtcccatcggtatttatcatggcagcgtgccgttcgacggtaataccggacaagttatcgtgacagtttctcgtcagggaaagactgtcgccgagatgcggggtgcatcgatctcggaatcgtgtccggatgatatccagaactggaatgcctgggttggcacgaaattcgccaataatacgatttcacgtccgccgccttcgccggctccgactgaggtttctgcggcttcggctcttctggcgctatggaggatcccgtttgcgattgtctttgtggccttggttgcgactatggtggctgcgacggcgacgcctgttcagcatgagaaattggctctgacgatcccgatttcggaaggttctccgtcggtatatagtgctggtgcgggcgatgacgatcctagaagtctatatagccatggcacgagctatggtttatatccaatcaacgggtatactcgcacaacgacaacgggtgctctaattacgccttttaccccaactggtgccacggctttcacatacagcacatcttggaatttgaactgatctgagaacagcagtggatctcaattatcactaatgatgttgaggaataatactggcgatctaagatacgactatatatcgaggttgaccgttaggtagttatttcttagggctttgaattgtcatcaaatctatgtaatctctcaacgaaagaggacagcaacgtggtgaataacttgactaatgaatatgacttctaatagggtacatgccaaatgatatcaaaacaaaataggaaataaaagtacattgatcatctatgcttggaatgtaagcccttccccccaatccatagcatctagactgatgttcgcatctatcaataactcgatatagttaacctcaagtgctgtcaccttggacacagcatgtatcagacacccaagaaaagaaagtcgaagacaacagaagcaaaagaggagggactcccgaaacctgaaattgaaacccatatatactagacaaaagaaaagtcaagagaagtagacacaagaaagtaaacgaggagataagggaatagccaatgcaaacaatgcccggagaaaaatgctgcaaggagtcaaagaccgataaaaagaaaatggaaagaaagataggccacgaccatggccatggccatagaacgccctttatggcaataaaggcgcatccacgatcctcaggagcttaagcctcgccttaaccgccgcccagcccgtcttaagtcgattctcaacacgacgatcccccctcaaccgcatccaaataagcagcatgcccagcatggcaatatcaaacaagatctgccgcacagcaacccaaatcatccacttcacccacgctaacagaccagatcgacggcgatgcgcaatagaccgagcttccatctgctcgcgcacagccgcaatctccgctgtcattttcgtcaaggcctgctcgacacggcggcgccagcgactgtctttcgaagctggctctgaatgggaatgtcgactatgcgggagaccgttcccactgctgtctatactaataccagaggcaggattgcgacgatgtttgggacggtgatgtgaagagacgtcggtatgtgtatgtgtgtcggtgttggagtgggagctagcatggtccgggtcatcgtgatcgtggtcgtcttgatctcgttcttcgtataagctatcacgggcttcctcaaactcctcctcatcctcatcctcgtcctcattatgcggactcccatccttatggttctcatcagaccccctccgccgccgataatactcctcctcctccggctggctcataggactgagaacccgtaaccgcgagtcccgatctcgtcgactggtatcatcccgtcgatcaggacgatcatagtcctcctccgccattcgacccgcgatactcccatacgcactgcgcgataacggcgggacgccgactgtattcaccggactagaagtcgacgacgacgaggtgttgaacttaatctggtcccaaacgaattcgagctcggcgactagctcgcgtgcttcgggtgtttgggatgcatattggtgcatggtgtggatcagcgtcgagatgtacctgcgtttggcttcggtgcgcgatatgtcgcgctgcgcataccatgcatccctagacaagacaagaacattgtcagtgtgtgtggtgtcggattgtagagcgaaaagcgatgtttcatagacccgagcaagatccacaataatcaaaagctttctttttccccgcgcttcgggacataccatttctcgcactccgcgtgcacctccggcgtgttcccaatcggacgatccattactccctccacgtccccctctgatgcagtattagctcctccggtttcctcgttgttgttccaggtgtaatgccggacactcacccatactctgcttatacaagccatatagtgccaaccgctcggcagcgggaggtcgcgcggtgccggtccggggaatcctcttaacggtattgagggcatgaacaaagactcgatctgtgatgagcgggtgtcagtggaaatccggatgcatgacgcagggcgcaatctgcacaacacgcacctacagagtccgacatgacgcgataagcggtccggtttgccctgtcttcatgggagcggggttgggcatcggcttgcgcgggtcctcatggggagcgtagaagactgtaaataggaatttggtgatacagcgaggttttttggttcttcaagagagatgctggaagggggtgtgtttggtgaagagggattgtgtccgatcggagattcccgaggttccctggtttgactgtgattttccccggaatgtggtcttcgtttcttccccggattgaaaaagattcactccaatcaaaatgtggaaagaaactcccaggagatgatctggagatggcgtgtgttggaccgcggctctcggcgatcattaggcacttgtgattgtcgccgaaatcgcattcgacattctacgataattgcacttttataagttgaattgtttctttgttcttatttcttaatcgtgtatagtaacaataaaatacaaatgaagaccctttactcgctcggtaacttcttcatcgtctgcaacggtttctccgcatccactggcgtacccgtcatcaactcggtggcggcgcgcgcctcgtcaccgctaatcggaggtccagtaaagtgcttgcgcgcataggcaaagtaccagatgacactaatagcaccgaatccagcgaaaacagcactggcataattcatagactccggggtaacaggcaaggtaacgggcatgcagaagagagcgacagccagcacgatccacgcaatggtaacgcagttgatggcgaatccaaagcgaccgagagagaacgaggaattcttcacgtcttggcggcctcgaatcaaagagatcaaaatcgggagaccgtacgaggtcgacagacagatagtagccacaccggtgaaggagttgaacgcagccgtggaaccaaaatagatcagtcctagcaatccatccacgacggccgatagcacgatagcccacacaggcacatccagcttggtgttcacctgccgccagagcgtgaagcccggaatggcgccgtcgcgagcgaacgcatacgtgcagcgactggcagctgtgagagacccgatgccggcgaacatcatgatccccagaatcaggaagagtaagccgaagccaccgcctgcagagccggtcactgtcttgaagagcaggccgatcggctggccgctggcgacctcgcgcagcatctgcacgttgggcatcacgaacagaatcgggatcaagtagaacaggccggtgatgccagcagccaccacggatagcacgattgccttgggcacctcgcggtgtgggttctgcacctcttcgcacatggcagcgaccattccgtagccggtcagggtgtatgccgcctgcagcaaacccacgaagaaagcccatccagcgggccagccgctcgtagaggagtcgtagtgagcgaagacgaagtcagcgtctctgcggttgtcggccattgtcaaaagcgtgacaaggataatgatgacactggctgcggtccagaagatgcagaccttgttgatgagatcgagataacgcgagaaaaagatgttgactagggcgcagacgagcatgactgcccagaacatcaatacggtctgccacgcattggcaacgaaggactcattgaagatggagatggcgctgaggatcaattggccgccggagaagatgatactcagtgtgacggtccaattgcccacgagggttagccagccgtcgatgaaggacatcaatggggcccagcgacgcgttgagagcatcgcgctccagtagtacacgcctcctgctgttgggtaaacggcgcagatctcagcgagagaggcggcgatggcgattgagatcagggagacgaagacccaaccccagagtatggtgacggatagaccgtcggagagggtgatgtagagggtcgtgctcagtccgaagggagctgccatgatggcaaaggataagccgaggatgctcagcatgctcaggtttcgaggcaattcactcttgtagcccatacgggccaatgcctcgtcggcggaggcatcgacagaagaacttcgcatgatgaatgtgttgggagaatgagcattccagtaagcaaggttgtcagttgatattatacctaaaacgagattaagaaagcgccccgcatagaaaacatggcgcggtccgagaccgcgtaacaaggttttagagatgaggcgaaaaaaaagatatctcgaacgaatgacagggattttttaggcttatctcgttgtatctttgtcctgggctgctaagaaaaggttgtatgacctaatggtcctacgataagagacggcatcatgatccacttggattcccctattttattcagacgcattcatcacgatatcacgatatcagatagcacatatatcacgtgagaatgcccctggatatacctcgcatcttaatcccatccatctcaaccctagacctggcacgcaagaaggcagagatgtggaacacgttggacaccataagaagatctacagcggggttccgtgccaagcatattctagcaccatgagtgcaagatcaagaacctgaatgggaggagaacacatctacagatcgtattgcctatgcacacggctcactaaggcactgactactttatacaacccaccaacgtaccaagaaggcattctaatgcgggggctgggatgaggacactggtggtgtggggaaggttgggtttcaaaggggacacttgcgattgacagattcggccggaagaggaaagtggtaccgaactagtccgtaaggagaagagaaatgcgagaatcctactcagctacggagaactcctactcaatacagtctacactggaaatggaatatttgaatgattcattgcacatacatcaaggtcacgcgaggtgacggctgccacatcaggaacatgctgcgaagactccatgcaagaaagagactgagcaatcgatgagcgccaggatggatatatcaacacaaaggaaggggggaagtagttcaaaaggtgaagtccggatccacacccttccttcggaatttggagggcagggtaaagggggtatcaaagtgggtaaagcacaaatgtcatccagtgatctcgctgggcagaagaaaaggaatttttttcttgtttgatgagatatctaatagaacaaacagggagatcagtaggggagggaaaggagtaagggcggaagtaggccctggatggtaaggccctgagtgttgaaaagggcgagagaaagatcgagatgggaaaaggctgtcgggatttttcggccgcaaaagaaccgtgcaagttgaactccgtctatgtgaccactctagtagtcaagtaggtcagtcggaccgccttttccgacatgtcacgttgaaagaagggaaataatgatcgaaagaaacgaaatgcgctgagtcgtgaccagccagctagtgccaactccaaatcgtaaaaaaaaaatgaccgtggtaacggaacgatcgtcagtcgaggtcggatgaaataacaagaaaacgcccattcatgcagtgtcgtcagtccggtgaagtcgttacatgagatgcaaatacagtcgcagaggtaaacagaggcaaacgcgagtttaaaagggtcagaaaggtgacgaggccggtgacgaggccaacatctatggactcagtccgaggtcatcattcaagtcagggccaaagccggccatatcgacagagtgcaaggatccaggtcccttgcccagggagatgtcggaggatgcatagtcatgtttgagtcgttcgtgtggtccgaagatatgcggtccgaagaacggtcggttctcgtcatttggagtgttgccatccccgccgacccacggcccgttctgccagaagcgggtattcgcttgctgatctccgaacagatcgtggtggtccgggtgaggatctgggccatggatggggaactcgtttggcgactgaaatcgtagatgcgaccgaccgaaactggagcatggagaatcggcgtggagcggcatgtcgagacccgagagaagggggggatcctccaccggggtgatgtcaatcgtcggattttctgtttgctgtgccagagccgccgacaaccggagattggaggatgaactttgccggctgtgagtagtcgatcgctcaattgcacgctgcacgaagctaccacaggccttcaagaccttttcttgatgctccggtgacagattgttgaagaaatcgttcgacagggatggcttgggcgggtcgtctgctgcaggaactaatccgtaggtagcctttgcgtattcggagagacccgacggcatattatagggagactggtaaacattgggtgctagcgaccgttgctgatccaggtaggcatattttccaggcatcttagcagcagccacgctaccccgatcaacggtctcctgcttgataccctccgactctttcctctgaataacatcgagtcgctcgcggtggctgactagcgaaaagcggagcatctgaaggagtcgagtgacctcctccgaccgcatgttcagagtctgaggcggcaacagagtgccatccgccgcccggggctgaacccgttgctgagccatggccagttccagcttctcgaggccattggcgggtggtattgagcccatcggacccaacagcgtctccaccaccaattcggggctgacgatagtgtatccggcaaagacattagcgtggtcggtaatttgggctaaccggcggcgagcaataagttctcggacattggcaaaggtattggtgggtgggaggtgatgctgctgctgagcgtgcgacttggcgaccgaaggatagggggcatgacgggcagactgattgggcagagttcgaaaggccgacggcatcgcaggagcaccagcagcagcaccggtaacagggataaaaggagggggaggggcgaggtgctgcaaggcagaagagggcggtcgggattgtaggtgaggggcgttgacattcgaagagtaaatattttgcttctgatgctggttttgctggtttggctgattcaggtttcggtagggaggggcaggggcggtggcagcataatgaaagtggtggggtgagatcttcgatgcacgagcgctgacacccatgccaagcgacttgacgctgtccaggaaattggcccgaggattgtggatggacacgctagggttgtgtgtatactgtgccctactttcggtggactgcatgcccaaataataccacatctgctctccctggaggttgaccgtcctgagtggggcgaattgattcctagtcgcatccactgtctcaaattcagcccactgatagggagatcgtgaatcgccgaatgcactgcctgccgccggtaccgctgattctaactcctttcgctgttcgggttttcgcgctaggtgggctgggaggggttggattcctagtgcgagaggcgtgaaattgctcttgcgaacaacaagcatccagcgatagggcatttcaatcacatctctgtagatttattagtgtgagcagaacgtcagataggggccggaaaaaaaaaaaaaaacttaccctctggggagcaccttgagcaaaagacttcgctccgaaggacgattttcaagaacaatggcgccattaatctccttgtcggcttgaaattggatcaaatttccttgcaccagacgacgagccgattcgattacccgacgatccacatcggacgattcacccaggactccattaggccgcttctggcgatggaacttgcatttcaaatccacacttggaatggagtactgcgtgccatcatcggcaatgacagcaatcgcaccgtgctcaacctgaacacccgccaaaagagcacaggttgcatgataagcgcgcgtgcattttccaaagttacactggaagcaggccccgcggacttcgcggcaaaagagacatttaagacccaggcgagccttggggattttgtcaatgtcacacacaacttccgtaccagatgcgtcacggagaattgtggtctcttctatgaacgccgcacaccgtctatgcgcatgccctttgccatcttcggtcggcagaagatcctcatagtccagattgttagggcatagcaagcacgggagcttccgtggtccttctgggtggagtttgggtcgtttggtattcggcccgtcgcccggattcttccgttttcggccacgagtggatgtcttcccaggcacactacgtggcggtgtaagaagatcagaagcgccttcaaagccatcgaattcgctctcaaattcaccatagtactcaggtgtgctctcgccgcgcagcttgcgctcgatctcgtccacatcgatccagacactgtctgcttcgcagttgcacttcttcgcgatgcgagcatagtctaaccattgctcggtcgcgaagttgaccgactcggcgcaattgtatccgacgttatacccagagtggtacccgtaaggaaatgtaatcacaaattctccttcgtaatgaaccaaccgattgacggtgatcccatactgcgatttgagaaggctaggcgagacgaggtaggttttgtgacgaaggaattgatcgcagttcttcgcatcactggaccagatactgcgcatgacctgttcgaagcgaggtgcatcttcttgggagatgctgtaccactgcttgggggcaccgaagtggatgtagttaatgctgtacagatctacatcctcaagatgccaagcaaaggtagccttccacatgcccatgtagagataagcagtgttgactccaggtaccttctgcccgaggacgtcaagcagattcggcaacttggcgacattccagatttctgtagaatcctcgaagagcgaaccgggcatgtcagctccgtacatcggattgttatacatgagtgacttccagtaattagtctcaagctcctcgcatctttccgcggtgtattcttcatggtcatggatccggtaatcaaatcctgtgtacgcctcctcatcggcttgatcaatggcatcgcctcggttgttctttcggcgtgcggtcacggacttgggttgtcgtccctttggttttatggtaggtagagattcgccttcacttaaatcctcggtcttcggctgcacggggttggtctcgggtgatacaggcgttgggggaccctctaatctggtcttctcgacgtcatctgcaggaggctcctctttgactttggcctgatttgaccgtttaggggggcggccaggccggcgcttctgaccctcggggcggatagacggggcccgtggtgtcggggccgcacggttcacgcgttcttggtttcggcgtctctctcctcggcgagccgggggttggtggctgctttcttcacatagacccttccactgaggaaggttgtacgagcgttggcgttcgatgttggcttgggtgtatgtaccgtgggatccgtggaactcttgcatgatgggattcttcactcggattttcttgactgcctcatccagcggtggaagagagtcggaccttgaaaagtacaaagtcatgagcacagccatccacattggtcttcatttgatcgactcaccattctttcggaggaatgactttcacgatgcctgcctgcattccatatttattgattttgttgatgaagccctggaagtctcggaattggtccatcgtctaaaacaataccacagtcagcctggctctggaggtataggcgttactgcccagtctcacacaactgggagatctccaacccttggtcatcgagcaggagggcagtggcgtggaactcaccggcttgaaaacagggaccttgccgtcgccatagtaatgatcaggctcaatttcttcaatttcctcaaccttctcctccacttcttcctgcttgatcttagatgtatcgggtgccggggcagattggtggtcaagctcgagatccgataactcggagggcactccttcaggcgcttcctttttgccgttggcactctgcggcggagtgatggagatttcgacgacaggttcgcctccgagcgagtcgcgctgcgactgatcgagtactgtcgccatcatcgagggcgatagaggaatgtttgggaaacggtacagcgtatgagttgccgtcgtcggatagtgcgaccgctgatcgacggcgtgaagggagtatttcccagcggtcggggaaatgggaacaagcgctgcgaccgagcgaaaggaagcgcgaaattgttggggtcaagggcaccagtattggtgtgttgagggtggtcgacacactccttgagtgtacagagtacaacggaggtaggtagttgaaacgattgcgataagctagctcttcgcgggtggttgtttttgcctaaactgaacagaaaggcgaactgttttagtcaggtcaccagtgaaagactgaaatttgtgagacaggaagttgtagtgtaggcagaggaaacccttgtacggagtagcaaaggcagcgctaggttctccatgaaaaaggtagagaagtgcagcaataccagaaatagaccaatcatgcaggtgccggcgacgcttgaaggtggagtgcacgatgggctgatactggaaggaggcaggggcaggtgggcacagggtgaggaatgatgggcttgaaattggacaaatcagagcgctaatatgggaagggtgggaatcgtccgatcagagagcaaagtggacttcggggcgactttggcctgggcgcctaggagccgcgaaatgattcgtaccgtatccggtctcggacgggtaaaaggattgccaggtctcaggggagtacaagttgatcgcaaacaaattcaaactcactaaatcactggaacggcagttaacgcctgcgaatccaaagaaatgcaaagaagcgcagaagcaaaggtggtatcacgatggtcaaaatagagcttggtcatagcaccttgaagctttcagtgatgggtcacgtgacaaggatgtaatttaagattatgtgatctccatgttctggatctgttattttaccgttatttactcaatttcgtactgtccaacaagtttggtattgtcacggatcatacaatgttcagccaatctcggataccatcggagccgagcgtttcctcccttgatgagatcagtgatcaacatcaagattaactgcatgtatacagtccaggacttatatcctagaacatatgggcagtataagttctagttattcttgcatcctctatttcttctatgttataagtgctgaattgtcttataacttggcgattttttctccgtatacggacggagtacatccatccatacttaggctagaactctctatattaatcaagcgagacctccgaggctggtatacaatctacactctctccgtaatatcttctagcattatcattacagggtaatctcatcttcttctcgccatgatcatatactaatccgggaaaataaaggtccggtcggatgaggctctagtggctagccagttcgttcactttatgtacctacatcatgcggtagataactatatgtgtctaccggggaaatatgacgtatattcagaagtgtacagcatacaatgtacaactcagacatgtactccgtacatcactttgtattatccatgtaaacaaaaatacataagagtggaccgtgttggtccttctttggaaattgaattgtagatctgtggatgcatgaacggtccgttgtcaggatctccaaaatctaatattagttagagcattgaggtcatcgaggcgcttggatcactctctgcatgatcacatccatgctgtatctatttgaaactattgcacccattcatcgaaaagctgggtatccaaattaatatatccatcgacaaccttcaatccccgcaggcgttcctgttcaatccgctcccaggtccactctgcgacatcccacgagtcagtattctccttctgctgcttatccagtgtctcctggctcggaatctgctcatcgtttatcttcaatacctcccgagccaacgatccatccacgcctcccatggccgtgataccttcaccactagcaggggtgccaacgtcggaagcttcggctgaggaattgacgtcggctagcgcggtcttgtcttcactcccggaggacggcgcgggaaggaatccgctagcgcgtagaagccgctccgggggaacagtcagccggcccttcttgaccacgtacttgctaagacccacagcaaggaccaccttttcgccgccactgtggcttgcaggtcgcatgaagcaggtcaagatgtacatccacttcgcatcccaagagatcaccttagagtgcatctcatatagttcgtatggcttgatctcgcgcttgaatgtgcagtaaacagatccgagtacaatcgacatcggcttgcgccttggcgctggctttccctctttcttgcttgcggctaggaactcctggtcgagctccttgctcacattgccgactccaggactgtaaagtcgggtcaccagcgttgtacgcgaaatgtccagatccgtgaagtaggtgctgttggatttgtgcaggttgtaatcggtctctagcaacggcgtgcgagatgtgaccatgcatggtacgaagatgggatgtgttggtttgcctcgggagtccacaatgagtctccccttggggaaaagtggcgcactgggtttcaaacgtaggttgcttacgaagtgatacagcaaacggaactgttgactcggtcagtagtgcaacataccatggggggaggtcaattccagaaagtcaaatttgacagtcgaacaagggcaaggaacacttacgtgccaagataatgggagacttttcaagttagtcactgcaagaagcaaggccaggtttctccatgaggcgagcgccaatacgcctgctagtatctcgcgtgtatactccatgatgaccccgggaaatttcaaccaacacagaagagaacgtctgatagcttcatacaggtacactagacaaggcttgactaggatatactccggttcatagatgtctcgggagatgagagactttggatcaggcagacttcaccaaacgcaattaaagagagacagaataatgtataaaaaggaatgaaatggtggacccaagttcacctgaattgatgagtccgaaagccgagcctgccgatatcgtgaattccccttcggaagccgaggccgaaacttgtgcacgtgatatcgtgattactcattctctcagtgcgcacgctctttcccagacaacccaggtgcccagaatctgccaaatgtcaataggttttcgaagccgtttatgggtgaaaacggcaggaacaagccaattaccctccaccgacaatagtcccgcagaaggagctcaccatgcaagcatcgggggaaatagtcaaagcttacaagcattggatccgagaattatgctaacaccatgacttgaccagacgttccctaccattccatcctcgcacagttctttacgaaccgaaagtcccatcccgtcgtttactctacgacgttgtcctgccgcgtcgccgcacgcgaagcctagctgcgagagcttcatggccggggtttgggttcgtcaggaatcgtgctaggatgaaacaatgttagacaacgtttggtcgagtcatagtattagcataactctcagatcctggttgcatggtgggctgatctatggattccaataatgctacccaggacctggtttggcctaggaatagttattgttgataagaagtagttgatgtttgaataattgtatagttctaatgcacagaatagggcctgaacgtatcgcagctgctcattggtcgaacaatcatgcattcatcaaataatatcaaggcgttcaccacactacattcaaagatctatgattcgaccttttgaagtttgttgaatttatactttcccgcttggaataagcttcattaagggaaacactcggacttgaaaaagaagggaagatactgatatgttacagcactatctgtatgatttgggtcgaatgttgttccaactatgggacaaggttatgccattttcacgcatagtaaatcaacacacaaaggaccagcgaccacataagaaggaccggtacctgaccataagccgtggaaggttgatttataggcacccttgacaatagaaatagcactcgagcatcgaatagtactctggctcattgtgatcccatactaacaatggggagggagtagcgaaaaggcaatatgttgctacactcaactttgttttgactggtttgcgctcaagttgagatacaacgcatgttttcaagtcacaacattggtctttataccttttcattaactcttctcaaatttctccattgccttccaggtaaccttaacctcaacctcaacctttctgttattgatcgttagcaaatctgaccaacacctcgtgtgtaggcacttttaatttcaaacttccttcctaggtccaaaataacataaactcttcgtttcctcctttctcctgctcgtctctggcaacgcctgtcaacaccaaaaagccttgagactgttcatcatgtcggacgatatcaccctcgcaggttatcttttcgaacgccttcatcaagttggcctacacgccgtgcatggcgtccccggaaaccataatatcggaatactgagagaagccactgatgcggcgcttggatgtgtcacacaccgtagcgatcttagtgtcggacttgtcgcagatggatatgcacgggtcaagggtatcgccgctgtgatatcttcattcgagaatatgtcaccgtcggtcccgacggcaatcgctgcctcgtaccgggatagaattccagttgtgcttgtgattggtacacccgaacgaaaggtgcaagcgcaggcttccaaattccaccattcattcttcgacgcgcagcctaatgttcctcgtcagcctgatgtctttcaaacactcgctgactgcttcgacaaaattaccattacccaggagtttcttgttcaccctagcgaggcgactgctcagattgatactgccattcgaggatgtatcatgcagtctctgcctgtttatatcgaactgccggaagatttggtcggcagtatggtaccggtgaagggactcgttcagcgcctggacttcaacgctccgccccacgatgctgagatcgaacaaacggtagtggccagtatcatgaacaagattaggcacgcacaacgaccggtgattctcgtggatgcgggtgttccatcttgtggtcttaccaaggaagcaagccagctggcgaaaaagactaggtttccaactgctgcgacccagttcagcagaggtgttgtagatgaaacactcaaaaacttccatggggatatctcggatttcgacatgtacggttcatacttcagatcgtctgacctgattctccttattggacctctgaataccactaagtgggctgctcccgccgtgttcgaggcgaagacagcagaaaccgtcacattcaatagaaattccgttgtcattggggaccaaagttatgagctcttctctagacctgtgcttcagcggattctagactgcctgactgagaggaaactgcgtgatcttgcgccctaccccaatttacccaatgtccgcgacagcattgaaatgctcccaagtcagagaaatactgcattacttcagcatgacatttattccaccttttggcgacggatgtctctttttttccgtccgggtgatattatcttgactgaaacccaaacagctcaggatggagcacgctcatttgttttgccgcgtgatacaaccataatcaatcctggtatcaggaagttcgccggacacatgcttgctaccaccttgggtgtcgcttcggcaaaacaaggccttgccaaagcaacctgccggctttcgcacggacgaacagttctctttgaaggagccaagggtttccaagagggccgaaatgacctcagagccatcatcgataacaagctcaatgccatcatattcgtgatcaacgaaggagaacccatcgttgaaaggctaatgcacgcaatggagtaccgccagcaggattctggtcactggagatacgcagaatccgtttctttctttggagccccaaatgtgacatcttacccggtctcttccaccatagccagaacatggggcgacattgacatcattttccatgatgagatggttcaatccgggacagggctgcacgttgtggatgtcatggtcagacccggagatccaaatcaaagcccgtgtattctcacggagatatatggcccacccccgagcccgtttaccttgaagaagcatcacatcaagcaagattgatcgccgcgaagtgagattggaaagacatttgggctctgaaacatgcaagattagacaagtcacaagatactttacaatatgatgttcatttatcataattgcgcccgcaaaacatagagaatgttaaaacaaaatagacagacacgtacgtatacagaaataggtgatatcatcctgaatccgctctatatgataaaatccaaccaccatctagttatgctgacaactctcgcaccatagcccatatagtaaactcctccaacgaatcccagaaccccttaggacgcctttggctaccaacaacagtgaacccctgttttagccagtagccaccagtgtcctctttattaacccgagtcataattcgtagcggagacgacacatcctttccattgacccgatgccgacgcaagatctcttcttcacacgccctcacaagatgaccagcaatacccctgccgcggtattgtggacctggggggagagcaacaacagcaagctcatagtcgccgggacaagcctgtcggtgcaacatttgatcgacacatcgagtattggcagcgtcttcatgcccgtttttagttgtaggcatccaaaggccgtcgtctttccatttctttatacttgcggtcccgaccaatttgggtgtttgatcttcggcatcttcaataaatgccaccgcggtgaatccgtctgcaccaagctcttcggacagtgcggagtcggtatgaagtctggtcttatttgtggaaaactttattttggcagtgtggctgacacggtagctggcgttcaccatggacgtaaaatctgagatccagggttgattgggaagagctgatgatgcatagaccttgatgtggaagtccattttgggatccatgtttggacctggaaagtttggtgagatccaggatgaactaaatataagaagatatcttgtttatcccaggaaatttctacaatttccaatgtggggttgaacaccgacacggagctaataatgagtcacagaaacctacctcgggaggttatctaaattctagccgacatgataacaaatgtctttgaaatgcaagtcccgaaaataaagatgatttcttaagctgtttggtctgtagatacggactagtgctattgaattcgctgttgtggaagtagacaaggggcatcggtgggataggaatggcccaaccacaatcatgggggcccgcaagtcagagaaacttagagcacatactgttgagagtgagtatatagtttcaaaatgaaagttgtagtaagagctcaccggaatgaagaggcttggaacctgcctctcatactcatcccatgtcttcccatacttgtttttacatttggtgatatccctcatggctcggtggccgatcatgaccgcgaagaagacagggtagaaccagggaagggggctgtcgaacccggtgattagggcccacgacaaagcgaaaaacatatcgcaactgtaatggatcttgcgagccaatcggtaccacccatcaacgaaaatggtatcgccgtcgtctgtcacaagtgtctttggattgttaacgtggcgccaaggaagctgggggaaggtattgcgcgtaaccattttgcctcgctccatcatgcggaaggcgttcttctggctgtttgcagtgtcccagacccagtagacgcaaagatatgacacaaacaataccgccaatgcatttttgttccatgcatatgttgacgggtgacgattagccaggtacagaacgcagtggcaatatgacatagggacgccagccatgttccagaagatcaacaagaatcccagtttctcctggtacatgtcccatgttgtggtgatgaggtgctctgccttggcgcaggcattggcgtaaaggaagtgtgccatgacaaggaacataacttcaccggagacatagccgtagagttcatattggcgagtggcagctgcgcagctcagacccaagagcatgaaccatgggatacggacttcgtagaacatcttaaagtccaggatcccgaacatgcgtgggttgagttctgctcccatgaaaaaatcatagattgggtaaccagtgatgcggtgctgggtacctcgagcaaatgcagagaaataagcgaaaaagctggcgagaaacccggacaaaatcgccacggacatcagaggaccgaaatcatctaggatagtgtagattgggaacattccagtgtagtgcagagcagccatgacaaccattgtgaagtacaagctactgtaagcggagcaataatactccagctgcttgcctttcaaatggcgaagaggcttcccataacacgtgaacccaggcatgaagatgtagcatgctgcctcgaagatgtagaatgtccagtagatgcgccacgccctaaagtgcggaaacgcaccgatgtaaacaaggtgacacagatgctttccgaagtccgcccaggactgtccgttttgcggcagaggtagtttcccgtcatagtaggtagcaccgatccacatgtaccacatcagcaatgggaagccaatcataagtgccaagttaccgagtgagccaccgaattcgaattcatctgagtagtccactttggtgtccatgccgggtatccatccaccagcgagttgcgcttgcttgaagtcagcgcgcgaatttggcttgtcaacaacccgagggttgccatcctttgaagacttgacttggtcatccatcttgagaacttgagactattgtattaattgaattgatggaaaccaaggaattgacgccaacaaagtacactcacagtcaaaaaatggtccgcgctgatacaggagaaaggagaaggagaaaggggaggaggaaaaagaaaggaaagggacgagaaaggatgaaagaaacaggaaggaccaaagggaccgagtattgttagttaaccttgggaacctcgaacctgagaagtcaggccaacgcaatgatacagttcccgtttgggtttagaccccgccgtctttatcccaattaggattagaccccgctactagcgttacttggaaatagtgctttggttgtattattgcatttccaaggctcctacttgtttcatagctcagataattgggcagtacgaaacactctacacttgacctggggatacataatagcgccatcactagcgcttgataatttctagcttggttgtcatgagagctgctcgctagctttttttttgattagcctcaatactgatagagtaaacctcctaagcctccgacaacctgttcgttctcgatgctgttagactttttccgtatatctattagttcaatagaatgcaatggcaatgacggatacctagccaatacatacatgtaggtatgatgtgacgtcaggtgatcttatcgcggattcgcattaatcagcgactcttatcaacccgccagtcccccgagattggacttctctccgaagattcacctcgctatgactgatcggtcggtcccatgaattatcagaccatcagtatggacggcaatgtccccgaacagcgtcagcgcactgtgggagggccgtccctggatcagccgcccacagatcctatcgctgatcccgcgcaagctcgcgccacatcccctcagagcttcactccacgctcacttctcgtcggtcttattattggtgctctcatcacattctcgaatacctatttcggcttgcagacaggatggatcagcacaatggcaatgccctcggccttgattggcttttcggtcttcaaggttctatccaagcacctgtctttccccttcacaccggttgagaatgtcttgatacaaacggttgccggtgcagtgggaactatgccccttggatgcggatttgttggcgttatccctgccctggagtttctgttgaagcctggcgaagatggacccgaaggcgatggcggagaaggcgaaggaggtcctttgaaactcggtttctggaagttggttatctggagtctgggagtctgtctcttcggggtggtgtttgcggtcccactacgaaaagcggtcatcgtccgagagaagctgcgatttccgagtggtactgcctcggcgttgatgctcaaggtcttgcatagttctggtagcgaggaaaaggttatagcaccagaaagttcccgtgcgggtatttttaacacggaggccgaaacagctggtccatcccaagaagacacaggcctcttgaaggatggcgatgctgaagaccaagcttccaaggagcaaaattggcgctcgaagatgcgcatcttacttggatcgtttacagtatcgggtgcatatgtgaatatctccaactggactctgcaaagttcatgctaactcaattagactcttttctcctacttcgtccctctagtccgtgccatccctctgtttggcgtgggcatggcggataactggctgtggaccctcaacccgtcgccagcatatatcggccagggcatcattatgggtccatcaacgtgcatgcacatgcttttcggggcagtcttggggtggggcgttctatcaccgttggctaagagccgcggctgggctcccggcccggttaataactgggaagatggcagcaaagcatggattgtctggatatcgctagccattatgcttgccgattcacttgttagtcttgggtggctggtgctcaggcccatcctgaagtactctccaagatggatagcctattttcgatccactcgtgctggtcagtggattgcactccgactacattcttctcagcactcatatatcaactactccgctttggagccagagcctcatcttttggctcatgaagatgtcgcccaacatacactagtaactgcaaacgaagaggataaggatgatgcaccgccatctgaactcatctcaactcgaacagtagtgattctccttcctttgactctcctcttgaatgtcgcatgcatgcactttgtctttggggacatcatttccccctttctgtcgacattggcaactctgctggcagtactactgtctattatgggtgtccgggctctcggcgagaccgacctcaacccagtttcgggtatcagcaagctgacacaacttctcttttcactcgccacgccagcatcccatttctccagacgcaccgcattagtgacgaacctgcttgcgggtgcagtctccgagtcaggagctctgcaagccggtgatatgatgcaagatttaaagaccggtcatctactcggcgcaagccccaaggcccagttctatggccagataatcggcagtcttgtgggtgcagttctatcaactgccgtatacaaattatacgtgaacgtatatgagatcccgggcgaaatgttccagacacctaccgcgtatgtctggatcttcactgctcgccttgtgaccggtcaagggctgcccaaaatggctggacaagtctctgtcattgctggtatcgtgtgggcattccttaccgccttgaggatcgtagctgcgtcccctgcctttgcacgcaacgggaaaccccctccttggagatgttggatccccggcggtatcgctgttgccgttggtatctttaacgagccttcctttaccctggcgagagccatcggtggtatcattgcatggtggtggtcgcggaggcactctgaatcgctcaaccaacaagtggacagcggaaacgccactactatgggatcgtctctggagactgaattacaggatgcgcagcgatcatcaatatcagccgaacaggcatctgaaaaagcagatgccgcctcctcgactgtcgtcgttcttgcctccggcctcattttgggtgaaggtatcatgagcattgtgaatcttcttcttgcaagtgggcgcgttccacatctctgatcaggagagatacgagaaaatgctcccatcggcatgattttttattatcaaaagcacgtattgtatttagagattatgttttgaacgatattagatgaatgtcaggtcatttttcgcggcctttaatgatttccaatctactgccacttcctggaatcgcctgtctcatattgttgctgacttcaaattggtcccgactacacgtgcagtaaaaatataggaaaggcatgtgctaacaagccatgtcaagaaaacagcaatcttggtctcagggtcttaatacccttttagttgatcgtatcccaatttaataacaagatctctaccaagtcccccagccccagccccagccccagccccccgcaccccggggaaaagcttgatgcttcactttcccctgcaccaattcggattaccaagcagaatccactccatggacctaactagttatctccgagacgtgaggacactaaattttcaaatggcgctctccgcaatcctgtcctggagggatcggcctgctccgacatcggcttcggcatcaatatcgatttgccgaagcaacatctacctagcacggagtactccgtactagagatggatttttctccatgagactagcaaacatcactctacggtattgatcccaatcatgccacgcatatggtcgaagggcagttttgtaatacaagtcgagcccgagaaggatcctgcatctcttgatccagcatacctcgtcaagtgggatcaggacgatgtattgaatcctcaaaattggactccccggtacaaatggtgggtgacatttcaactgggcatgcttgctttggcgggtagtctagggtcaagcatcaccacgccggccgatgacaccatcgcgaggtatactggcgtgagcagcgaggctgccgtgttggatgtgtcgctgtatctgtgagtgggattgcaaaaaaacaccaaatacaatgctaatagtaatgccagccttggcttcgtcttcggacctatcatctgggcccccctttcagaaatctggggccgaagagtcagcatactccccgccgtcttttgtctagcactattctccatcggcactggcgtaagcagagatgcagcctcggtgttcgtcacgcgctttttcgcaggcttcttcggctctgccccgattagcaacgtcaccgctgcactaggtgatatatggagtaaagagacgcgcgggaccgcagtcagcctctatgcagtggccgtgaatggcggcccggcattaggtccagtgatcggtgcagccatactgttgaatccgaatatgggctggcgctggaccgcgtacatccacgcaatctgggtctttgtcattttcaccttgaccttcttctgtctgccagaggtatacccgctagtgctactcaagcgcaaagcacaacagcttcggaaggacaccaatgactcgaggtactatcatccccatgagcatttgaaactcgatgtcaaatccgttgtcacgaagcagctcgctcgcccattgagaatgctggtcactgagccgattgtcacctgcattgccttctatgcttccttcgtctacggcgtcatgtacctaacccttgaggtatttccaatcgcgttccagcaatctcgaggttggaaccgcgttgttggctctttgccgttcctgggattgttgattggcgtcatatcatcggtaggtctcaatatctggaaccaataccgctataaccagatatccaaggaggcgaatgggaaagcagtacctgaagcacgacttccgcctatggcattcggggcggtattctttgtcgtcggactcttctggtttgcttggaccgctgaacctcctcaccactggatcctgccatgtctggcagccgtatttattggcattggattcaactgcattttccaacagtgtttgaattttttgattgatgtgtataagctctacgctgctagctcaacggcagctgtcacttttctgagaagcttgctggctgccgggcttcccttggcggctaaaccgatgatcagggctttggggattggtcctgctgtttctattatcggagctgtggctgcggctctattgccagtaccctttttgtttatgaagtatggcccaaagctgcgagggttatcaaagcttgcgcctgaggattcttaggattgttgataattatagaatagatggctagatggtattccacttttatcccttttctaatactggtaatagctagtcacaccggtcaaatcgcatatagtctcgtggttattgactgcaaatttatatattcctttgtcttcaaggtcatgtccaaaaaccccaaaacacccttaaacatgatgcaaatccccaaacaatacttacaagcaattcaatcatcgccggcagtttctggttgatcatctgagttagcaataatgggttcgatctcgaatcttatctgaactctatagacccaattccaaatgactactcgggcgatacgtctcgtacctctagggagagatgatataagaagtatggcagctgcttttcctaatttcgtgccgagaagttcctcatactcagcagtgccacgttcgaccttcatgcacgactcgtgcatcgcagcttcgaaatcgcgtccaagtctgggatagagtatccgcctgatatacggtccagtctcatcattgacgacgtgggtaaacataatatacctcaaagtggacatggggtggtcatactcataaacagccttggcgaattcattccactggatgttatcgtacctaaaaatggaatcagcaacaagcagccccgggccgactagatgtgtatagctattactcagacttgggaagttgaatctcgctagggtctctgggttcagaacattgttaaaaaacgctgtatgtcggtacctgtttccctcggtagggaggcccgtcgactcgggttcgcctccgtccataaggtcgcccagatctcggtgatagctttctccgagttcaaaaacgtctggcggcggggcgttcatcaagtcgtctagagttgctgttgccggggcaatattgcagtctggttcgttagggtcttctaaccaagcttgtagttgagctcctttttctcggtaccggttgattgtcgttgtagaaggcttttcatacatctcatcgtctgtgttgaagtcttcggaatcactggaggcggcaatatttggagaagtgggtggttctggaaacaatagttccggtccccaaaaccgtccttcagtcgaactctccccactggtgcgctgacgcttcgaggggggagaaccgtgagagctaggagctgggctccattcctgatttacatcctcaacctcttcgacgtgcccccgcttcctaccgctataggattgcatgctgtcgttggaggatctcaggctccatcgttcgattcggccagactggtgcgcggccctcaaggatatgggagcacggggacgcggagaaccgaagtacaaggcatcatcatcatcagatgaagactcactttcacctgcattggataaggtacgtctattctgtgacattcgggctagagggtaggtcaataattcgccgggatcggcatctggcatatcaatatcactgtcagatctggggggagagggattgtcacttattctaccatcactggcatcgttcatatcgatatcactcatgtcaggtgtaatttctgtgcgagaattgccatcattgtcggtggcggcttcctgaggtttagccttgttcttaggctcagctggcttagggtctttacctggctttggggctttggctgtcacatttttagggtaagtcattgtagaaggtgcattatgcccgcctctaggtgccgtttttggtaggggcagtgtttggccatcggaatccgagtcatcactgcagtcgcagcggcggccccagcatttgaggctgtggcagaaacgcttcattgttatggttgagttaagctatacgtcgaacaattggattgatagagaagttgaatttatatgatgttggatctgttgtattgtacttgctggacgatgctagaatggagagcaacagagagatacaggcgaagctatatacttttgccaacgtctctgtttttgctcaacatgggtctgcctgctaacccacgagcgttgaagcattactaaaataggttcacctcaaatagaaccgcttagaacaaaaggagtagcagttcaaacaatggagacaagtgcatagagaggagtttcaaccgccaagacaaagagactcgaacttaagttgacaataaggacgactaatttgggaaagccaaggatagaacaaggaacggacaaagaggagtcgaacaatgtaatgttcgtctaagaaataaagagcgagctactatctaccaaggccgtcaacaatgtaatctgctattctcgaatatccaagcgataaacatagtacattgttaaagacaagcaaagatcaatattaagttgctctccaaaggacgaataagcaatatatgacctatctctagatctatactcatgaatattcttgtttgaccaagtccggagacacggatcaacaggtacgagagtcaggccatatcagaagtttagcctgaataactcggatcgggcagatttattaaaatgatcgaatatcggatgtgtatctatttaggcaagccgtacgtgtagtatgccgggtgccgctgacgtccttaatatattaatctatggcccagccggtatccgagggctgaaattccttggagttcttgagacctacgtatgtaccagataatccctggcactcgagacctttccctttcccttttagtactcacctcttgccgctttttgatcactgagtaaaaatgagcacgtccctgagtaccctaacttgatcacgggctattatatgccagaatctcggatgaatactgttatttttcatccctgatacagctaggtcacgtgattgaccaggctggtttttcgcccgaaaaacacccttttcttttcttttatttgttttgatcactaagttgtctatcagattgtcatgttttaggactattattagttttagagagttagagaatttattgagatttttcctgctatatatacactcgccttaccaccgttttcccgtcaagttccaatattctatttcactatcgatatcaattctattcatatagtgtttctgaaaagggctagctaaggtcctagcacggaatgcgacgatatattaattcaagttctcaattttcgcattttgatcttctgtcagagttttccattctttagcgtccttcaaatgttccaacctatgaatcctctggtccacaagggcattcactcgccagcgatcctgtgttcccttcctcttctggcaacacctcggcactgctagtaccttcttcccaataaactcagtcggatctactgcaaatgaaagccatgtatttgcataaataccattattatcctcaatgtcaatgatgttaatctgtaagacctcggggttgatatcgtcagctgggacaagatggtcaaatgttataccataatagtcaatcagcctacttaaattaagaggagagaactgattagccatagggccatcagagctcgttgcctccactaggagagattgacttactcctccggacgcttctccgacatccagcccaggtattcatcctgcacccccagatcacccgggacttccggacaaacatcccgtccgtatatagtctgatacgttaaccgtgctagctctgggcctgctggctgtgggaatgttcggtctccaaactccagacgccaatggatatgtggtaggagtctttgtatggcgattaggggaccttcgatttggattctgagcggctgatcagatggtgggaggtgataccggccggcgggtgtgtgaatacaatgaggaatgtaaagtgggagcgccatagatgagaccacttgattgctggagttgattgaggaggcgcagtgactaaacccgttagtgagtgtaatcttggaaagagagggcactagattaggttcgactagcttttttatatgcctagggaagagaactacgatatctcggggcttatcatatgacttggatccaatatcttcggctattaaaaccttcgaagaagtatggcgctgatgtaccgattaatacgccgctgcctggccgtgccaaccaaccaattaatttatacctgatggacgaagcgcttcgctctgttttcctataggactatttccccctgcaaataattactgatagaaatctaggtatggcgagcgtacgggtaaaagtcataatggtagaattctttaactaacaaaataaaaaacggtccttaatgaaaattagtgcggacaaaattatgaagcaaaaatatacacctatgtacttttccggtcctaatattctctggtaaaaagacttggtaattagcatttgaacgcactacctcagttcttgataattacccctgagtgtgacgtaccctggttgatttcactctgttctgatcccgccccctgtgactggctgtgtatgcgctgactgaatgtgcaccctaggcgctactttatatggtaaaaactctcgcgttgtattgccccagaccaatcgcatgtactggctatttcgagctgggattactcggatatcacatggcgtcatttgagaataatggttgcggcggcatcccatacaggcgaattggttggctggcgttaaggtaacactcacggcaagccgcgtgttatgttagtgcgaagtggttagttgcctgtataccattttaaggcgaccctctggtgctaaggatagaggtattggcctctatcctctgccagccttatccaatcccctgcttccgctattctggaggccgtgtcattggtatcatgcctgctcgaggtgactattattactcagccttatggagatcagttctcactgatgtgcctgggtcttttaactgatcctgacctgaaatcgcggggagaacctctgatagctcctaccccactgatggggtccttatctccgtctctatgtgcccggcgccaagaccgctcagccacgttaagtgatctcctggcctagggaaacagtctcgccccatgcatgcttgtgggccaacgatttgatgttgttggatgaacgcgcgggggaagtgaaacagtctagatgtcattttatggcatcaacctagtttgagaaatggtggattatggaagatatcatcctaattacgcgccgaagacctgatggcctctggtccgtcgataaatatcacctgccatctatcctctggagcccagctttatttctcatttcactttctactactgttccatccctgccacacttgcacccctcttgtcaccttagcacaccaccgtatgtacctccgataacctgccatgcctatatatggtttccattgcatgcgccgtgccgctaaatatgtgtgacatttacactgactactgggaatgtggtcatatctatctcgtgcgcgagcatccttgcccccgcgttggccgttgcgtccgccttatcaccgtgtggggataactaagcctggaaactgtggtgctggaggctgcatgactcccccgtcttctgactagactctccgtcgtggccgttgatcatctcactgcctgactgctctgccgccctctctatcctgtttcccgtctctcgtccgcctcctgtggctgtgggcccgcgcaccttggcccatcccaactgggacggggaactctttaggactggctgtgactggcttgattacacagtctggttcatgtgagctctattgtgattgatctactgtctactgtctgtctcgctgttcctacgttctttcttgtggcttttttcctacttttctgtctcttactttatctgtattttgctggagggatatgtttgacttggggtgctggtttctgtgttgcccggcttattttgtgctgatttggattctgcgaagtgtattatagctattagcatgagctataagaccacactcatttctcagaaatcatcatacagtaggtacaccacgacatgcatgcttaataggcatgaagaagatttctcttattcctggtgatacttcgttattagttgctgcgagctcgtacatttttatttcttagtcagtttaagtattttttttcctacataataaatgtaacgtgatcatttacccccaccattgtcgtcccgaagggtttgcagggtttacactaccttatggcctcagacacggggggttgagtgcatcggtattactcactgattagatagttactgagtatcactgagcacttactggcatcagtcattctgcacgtgactggattgagcatgatcactgatctgagtccatgctgacatctactcagtgagcctgagcctgagcaccctcataaaagcggcggcagatcaaataggaaagccccacccgccagggaaaatccggtacgtatagttacatgttgaagaggggacccctgaggggcaccgacagccctgcctgcgaaacaggtgtgagagcagagtcgtcactgggagtagtagggtgctagagaggagaacaccatggggtgactactgagaagagaggtggaaaggtgtctgcgttgctatctaggcctcgggagtgcttttatgtcacatagccacttagtcatcctgctctggaaacccccactgcaatgtatacattgtagatattaattgtttatttccccaggtgtggtgccggaatatttattcccctctgagcctcgaagattgcctttgcatcatcgtactttcaatgtaacattttccattcactcgggtccatgcggcgttttgggcgtgtttggcgcatgtcataacaaagaccggggtgctcttagttagtctgttctcattggcccagactactcgctttgagggcatcccgtctcatttgctgccgggaggttgcatcggtcttggctggcttggccatgtcttgcgctatccaaccgaatccgttttctacactccataatatatcggcagtggcagtgtgaggagtataatgagtagatgttcggatcaaatcggaatgagaaagaaaccacctgcaaatacaccaaatatggcaatatcagcacgttgctttgggttgcgccataacaagccatgccgctacgcgatgactccctgtacttatttcctcgacaaagcggtaaattccagaaagtactgaatgtatagagttagcgctgaattcgtctgaccagtcacaatccagagaagacgcccccaactcctttccccatgaaacttccctcatccccgcgtcgtccgacgccttccccgtatcttggccagccccagacattggagatccccccggtcacctcggattaccgcttttgtgaatccggaggaattgaaagtggcctatataacccgctgatcggcattcccatcatgtctgtaatttgcgatcttctcaggtgtgggcatcatgttcggcattccgaagttctttggctggagaggccggtctctcaacctggctatcagttcccttggtagtctggacttcttgtatgatacaattcaattattattctgaaactggcaactaacctataaggctatttggttacgatcaaggtgtcacgggtggtctgctagacctgccctcattcatcaaatacttccccgatatcaacccactagatccagccatcgccgataacaagcccctccgatcgcagcgcagtctgaaccaaggcattgcagtcgcatcgtacaatctaggatgtttcttcggcgccgtcttgactatcttcatcggtaatccgctgggtcgacggaggactatcttctgtggctgtatgatcatggcgactggcgccctattgcaatgcaccgcgtattccctaccccatttcattgtcggccggattgtcactggtgttggcaatggcatgaatacaagtaccgtacccacctggcagtccgagtcagccaaggcccacgatcgtggcaagatggtgatgatcgagggtatgctcatcacgggcggtattactcttagctactggatcaactatggtgagttggacccagtatgtatgtgacgatcaagtcgcaattactgatataatcctgaattaggcatgtcgttcatcggagaaaaagaggtcgcttggcgattccctctagctttccagattatcttcgctatcattatcttctgctctatcctcaatctgcccgagtccccaagatggcttgtcatgcaaggccggaccgatgaggctttggagatccttgaatgtctgaatgagaaaacgcgggatgacccctacatcaagaacgagctcatcgccatcgaggaaaccgtcaaagaaatgaacaagggctcttatagaagtctgttcaagatgagcgagtatcgagaattccatcgcgtggcactggcctacgtcaaccagatgttccagcagatttctggaattaatctcatcacctattacgtgagatcccctctctcaaccgagatgctatcctagccctatactaatcaagtccactaggcaccttcactgtacgccgagatcggtcttggaagcggcaacctcccaaagttactagcagcctgtaacggcacagagtatctaatggcagcatttatcccgattttcatcatcgagaaagtcggccgtcgtccactgatgctaatcggcgtatgtcactcccccaaactccgtgcctatccatatcccatcagctaacaagtacttatcaggccgccggcatgtccctttcaatggccattctagccggcactaactaccgcctaaccgtcctcaacgacagccgcgccggcatcggacaagcggtcttcctcttcgtcttcaacaccttcttcgccatcggctggctgggaatgacctggctgtacccagcggaaatcgtgcctctgcgcatccgcgctccaacaaacgcactagccaccagcgcgaactggatcttcaactttatggtcgtgatgatcacgcctgttgcgttcgagaatatcggatacaagacctatgtcatcttcgctgttatgtaagatacgatcctatcctccccattaacccattgagccatgacttggaactgacaatagcagaaacgcattcatgttcccctgtgtgtacttcttcttccctgagacccgctaccggtcccttgaagagatggacgctatcttcaagaagtcttctaatgtcttcgatgtcgttactatctccgttaaggagccttatcgctatgataagcatggcgagctcaaacctgagtacctggaggaggctacccgccatgcgagcactgatgtgcacatcgccggtgcgaagtttgacagcgatgagagcggtcatgaggtcaaggcttgagtggttggaagatgtggttggttgtgatgttggtggatttcatttatacccgttgtgccagtgtgatttgatgctagtatcatttcactgagaatgttttatacatggcttttagatgtaaagagatgttaataacagactttctgcgtcgaattttgattaaaagtcatagatgtggagagagatatatataatatgcagactagcaaagcattaacggaaggacgtctatgaaaacggtaaactcgtcagtaaattctacatagctatgaatataaactatctgtgttggaacaagtttgaaggtccgggtataccagctcatctcagcgtgacacgcattttattcgagatcgatgtcaatgaaggaactcgaggaagatgcttgtaacttcgaatcgaagagaaacaataataaaaaagggtgtgtaagacccgaatgaaaaatgaggcaaaagaaagaaaggtaggtatgagaatacggcatctaagacacggacgaaagaaaaaaaaaagacagatgatatgattcagatgcggaaatatgcatccagcgcaaagcacagattcaaggagggttcgttcatcacggacgcgggctatagggatatcaagatcgaggcgaacagtgtggtcatattaggcatgctcatttccgtccagcggggccactgacacggcagcgagaatgcctatgttctgcataatatgtaggcttcctgcaagggtgaggtcattcagactaagcgtcccgggtagggaggggttttcgcgagattgagccggacggagaagtcggcactgaagtcggaagggctggaagctcgctggtgggagcaggggtaggtgcggctgatgggcttgacggtgaaggtgcagcgggagcaggctcaggagcggctggggaagtcaaaacctgcagtgcggcgggagcgggagcgggagcaggggcagcggccggagcaggggcaggggcaggggcaggggcaggggccggagcagggaccggagcagggattgcagcaggggctggagcaggaacagccacaggactcgaaacttgtggcacggcaggagcggtagcggctaatgggctcgaaacggcaggcgcagcaggaacagcagcagctaatggggtcgaaactgcaagcgcagcaggaacggcagcagctaatggactcgaaactgtaggcgcagcgggcactgccataggtggagcgacattgccggcgctattgctacgttggcgttggttgaccggcatcactgggcgctgcattcctggtccgtatggaccagggctcatcgaacgcgggccgggccgggggccaggagacatggattgtgggacaggtcgtcctcctggtcctggagacatggagcgtgggacaggtcgtcctcctggcccgggagacagagagcggggaactggcgggaagttgacagcagttccgggggcagggtaagggcgagaaggtggaggcccagagaagccagcgccgggggatctcggacgggaatcctgaggatagaatctaggaccgggcggacccgcgggcatcattgggcgaccgtcagggcccatgatgggtggaccgcgagagccggggccaggaggtgggcgggcgcgaggcatcacaggacgagccgagaggcaagaccgtggggcaactccttgctgggcgccattaaggcgcgtacaaagagcccacccatcatcgtactcatgaaccaagcgcacaagcgctcccgcacgaagtccaagctcgtcatccatagaggggttgaaatccagttgcacacggtagacattggtagggggtggtgggccagcagccatggcgcctgcagctccggcggcaccggcactggtagcattggtaggggtggttgcagattgcgtcgaaccagtgggggaatggccgcgtgattcggcggaatggtagagctcggaatcattggatgctcgagatgaagcagcagcacctgctgcaacacccaccgctgcggcaccgaccgcggcagctgcgacggtcgatccggaaggttcagtcgatccgggcggtccagtggttggttgagaaggtccagtagtcgatccagatggttcagtggctgattcagcaaccgaaggcgcgtgctggctggcaggggcgttgaaaggattgaccgggtccctgaacgggtcagaaccactgccagcagatttcggcggggtaggaggcgccgagtcaccagtgagattacgagaggcgacggccgaaccagctgcagcacctgcaacagcagcggtggccgggctcaaatcggaagcagcagtggcggtcgggttcaaggcgccgccgctcagatcaggcgcgaattgagtgacgggacgaacattaagttgcgggggtgtcgaaagagcctgtggcttggaaggaggaggaggtggcaaagaagcagcggtaccctctggcaggccttcatcaccgaaggtcttctcattctcccgctgatatccctcttggcttctcttcttctttcgcataaagaagaaaaccagagcagcgattataccaacgccgaagatgacaccgatagccacaccagccttcgcgccaccagtcataccctcagaagtagtagttccaagagcggttgtcgaggccgatgcggcagagtctttggccgatccggtggaggttgcggtggaggttgccgcgaggagatcgttgacatcctgggaagtttccaaggtggaagaaccagaggtggacgacgccgaagtcacaaaggaggttgtcgtgatttgagcctccgactcactagtcgtggtggctgtctttttagtctcagtagtctcagtggtttctgatttagtgtcctgagtggtgtgggccacggtctctttggtggtggtcggttcctccttggacttggttgtggtcgcctcctcggtggttttggcctcggttgtttcttctttggtcgttgtttgttccttctttgtagtagccgcgctgacaggctcaccgacaccggcgtgcacctgcgtcgtagtagtgggttgggcaccggttacataacctcccacctcccctgtaaaatccggcgccacggtcttataaacaatcacgacatcgcctcgctcctcgatgacacctcgtgcctcaacagttccttgctcctctagttcctccacattgcgtgcatggttgtgatgcgcatggccgtgcatgttgtcggctccagtatcccaggatacgtggaggggtgagggttaaggaaggaggttcgcgtattactcctcacgagagggatacgcccagataccaggttgatttctgagtaaccgcgtctctgggtcgattccagctatgcggaatgtgggtagaaagaatggacgactgagatcgagcacagccgatagtcaagtcgagaataaaagaaaggacgtcgacttccaggtcagacaaattgaaagaacggatggaaacaaagttaaaagaagcaaagagaggaaagagaaaagcccacgccgcaatacgaggaagccctggggaaccacgaggagccgaaatgagatcttgggacccttgtgtgtatacaacaacacgctagcccaaacaggcagcgatgcacagacctttcctggtttgattggctgtcatacggtgcctggcccgaaggagttacctgacccacgggcgagcacccttgcagccccactttcctttaagtggctgtggtgtttccaaggtttggctttacgaactgtagaggacttttaaggagtcttgttctaactagtattttacatatatacggagttctttgtatatccctagagtatagttctgcttgaaatacccctaatctatctatgctgtagatcgtatatctaatttaccaacactataaaatacacgggaagtaacaaatgccgaccccatttgcccgcccccaagcggcacattcgctaaagtgtgaggcccagcacacgggccaggggtcacactactccatggttgtttcaccctagcacaacagccacatttaattgatcgctcacggaggccgtaatttccggtgtttgccggaaattcacttttaatcaattcaaattttaataatgatgcatgacacctttgcgccattctcatgcaggtccctcaggggttacgctgcacccccaaggttggggacacgtattgatattttggtacctgtatgtaagatacagattctgtacaacataggcagtactccttacttgagtaccgagtatttgcatgttatagtctatcaatagtggattgccaaacgtgattaattcgctgttgcaggttccacgcctgtcattcccagatccactcgtgcggtatcacccgaggaggcgcagaaactgtggcgtagctccttcaggtgtatcataccattgcttcaagtctgagcgaaatagggatgggcaagggcctaatttactgtcagatgttattataagacattaagtcaagttacatacctctgttgccgagagtcttgcgctgctctcgtagcacaataggtggctgactaaatcacggccattcgaggatgcaccaggcagaatatcctcccagctctgcgtcgggaacgagtagaattccactttcccccaatctggcagaacctggacttcctgttcaatggttattaacgacgtttccatttgccataggggtgatgcttaccggccagcgctgttcatccggagtacccagttgtttgaagatggagaaaatcagcgatagatcgctgcccacaggcccggagtcgaagagctgacggtgaccaacggcaatagcttctgccactacacagccggcagcccacatatcgagagctgtcccataccctttgaatccaaagagaatctctgggggtctatagcaggtcgtgccgacatccgtgattttctcggtgggcggctcagatcccgcatcgccttctttccatgagacgccaaagtcggccaaatacgctggtccgttgggggagtccatcaaaatattggaaggcttgatgtcccgatgaagtatgcccatgtcgtggatatgcgccagggcacggaatagatctcgcagaatcgatcgtgtttgagcagcagttaccatgtctcgccggagcaacttctcgaagtcatatcgcatgaaaggaaggaccatgacaaacctgccgccatcaagattaaatgtctcaatcaatggaattatattggcgtgcgccgcttcacgcaacaaacgtgcttcacggtgagcatcatggggggctgtcatcatgtagggaacagtgactttcactgccctaagggtcccgtcttccaactttgatttgtagatggtggagtgaataccatcaaagtggtggaaacaggaccgatattgaccgatcacttcccctgttgaggcctctggttcttcaaagtcattctcgtgctgtgggctgctgtcgacctgtttttcagaccctgccaattcagcttgatcaattgccttttggcagatagaatcatattcatcctaggtggattagtcccagttttcacgcccgtcccaaaaaggtacaccactcacttttgaagtggccttgtcatacgcctcggtttcagtttgcttggcttgggccatagcttctgcaaatgcggaggcaggcgaagaagaagctttctggtaagccgatgtactacacgcaaatcaatcgagtgtccatgttgatatagatgggaaagtcgcttacagagattgtatggctcgcagccggtctgtgaacccgaaattatccttccaagacatgatgtaagaacactgctaatcaaggtagtaacttctaccctactgccttgcagtttttatggcagtgtatagtcaataattaaagcaacgtaaatatagggaagatctattctatcacctgatgaagagctatcaaatgcaacctgaggcagcaaggcgccaacatcccgaggtcaaccgcgtggatgatgtcaagtgaccaatcaaggagtagttacagttttgtgacgtaagttacagacgctcaggccgttgttgatgatttaatactgccaaatactgtattacaattacaatctccgtcattccatccccattgccgtcttcggccaacatcgaatgacaccctaccaactgacactggcattcggtccccgcattcatttcccttacttgattgggcccttctcgactggaggaaacttttggttttctcttacatgttatgcgcttcgtgcgctaccttgctcagtacctcaataccccggaatctgaatcatggacctctcaaggcaagagtatccaacgctgctggtaagattgagcaagtcgagctacaaaattgacaagcaaagcatctagttactgatcgttgacggtgtctcttttatttaggctagcctgcatcccagccaagctacaaccgtcctgagcgatcgcatccgactcataaacaaggtcaacacggatatcgcggattatctacaggtatgacaatctgtcactgatccaatcagattcctggaagggatctgcaacggggagcgacattggtgttgacatactggcaataggagcgacgtcgagttgaagaagcatacgcccaagggttgcggaagctggcgcatcggccacagttggacaatggagctgctcttgggtaaattgacctttccctggaagattgaaattttttgcatccggtaatgatactgacctgcgaaaactagcattttccaaatcccctggcaacgcatcatcagtgccaccgaaaccctcgccgtatcgcacgagacccttgcgaacaagatcgaggaagatgtcgaacgaccactaagagaatttagcaccaagaatcaggagatgaagtcgttgcccggtatccaaagtagtctggcggggttggcgaagaatgtggagactgcgcagaagaaggtagacaaggccagggcgaggggtgccagaggtgcagacaaactttccagcgagattgccaatgccgaggaagtccaccagcaatgggattcgcgggctccctttgtttacgagcaactccaggcagccgatgagacccggctgaatcaccttcgggatgtgctaacacaattggagactcacgaggtggatcaagtcgagcgtggtcgccaggccgctgaaagctgcttgaacatccttctgaacgtggaaacagcagatgaaattaagacctttgctgcgagaatggcgggcccacgagtccctacgcaggccatccctagaagacagactgaaccggcagagacaactttcccaatcgaaccagtatccgagcggacacagacagcgccaatcgatcgtgaattctccacgccaacaacagaggctccgcttccgtcccttccacgcacccatgatgatgcggaaagccaactatcagaggcatccgagagaaccaccgtcgctccgacacctccaggtaagttctacagtcgggttccctatgaaacattgagattctcatgatttatctagtaccagaagcacagcaacggcatactcctctggggggattgagacgtcttggcactgtcatgaacaggagaaagagcgttgtcttgccttcaactggatctcatgaccgaaaggcagacaagaaacgtagtccctttgctgcattcatgagagccgactcctctcgcgatatgcaaatacctgaatctcctcccgcgaccggtgaccgtccgggaacatcctttaccgatcaatcatccttgcggaatcctagtatgtcgcaagaccgtgccggattagatgctggggcaactatgtctgaacactcggagaccagaaatggagaaaccaataaccatatcaatcaggtaaattaccaaccagcgagttaattaaaggtgccaaccactgactgtgtcttgtttagccacaggttgatgccgaagggttcactcaacgccctgcaacaattgacgagatcactcgtgcccagaatgaggcagcggggtatgttaccttttgccaacggtgatgaacgaatgctgacaatatcactacagcatagatgagtctggtctaaacttgacaattcgagatcagcccatcttcgaggatgagaatcaagcgaagcgagccatggatgatatggcaaataccctccgaatggttagtaacaggtctcgccattgatcaaatattgtgtatgatacttactctgtgtacagcgggctccgcagacaggagcgagacgaaacgcaggcactattcggggacgccgtgacgtgcgcaatacaatgtttattgcttcgcctagcaatgagcctccgccgtcttcggcaggatcggagtcacagccaccaacctcgccaatcaggcatatcacctcccccagcattgcccccagtacggatgatcacgctatgtcagatactacatctgttcgctccggacatggcccgggagcttctatccatcctgatctatatgaatccggcctgaatgcttcaatcattgagaccatcaatgcatggttctcagagggtaatgtcaccaagtcctttgtcgttggtgagcttgctctggcaaacaactccccgcctggtactgtggtagacaatgcgcgcatccgactcgataacttccaagtgctggaaaaggtagcggccaatccccactttgtccaggaggccaaagacacaggcgatgacagcagaggcgaatacgatatccagctaggcaacatctcccgccccatgccgacagtcgcattcaaatatcaactgcatatcgacccaagcaacccctccgcctactgccctgtgatatttaatccagtgtggaacttagaagaaaaacaagccagcgccatcatctactatacgctcaacccatccttcatatcccacacaacggagtcaattacccttaagaacctagtcttgaccatcaatctggacaccgcgaccgaggacaaaactaccaagcagccgcgggagtccgtcgcccacgccatcagcgccgccatgtatcccaataccggcgccaccttccgtcgcaaaacctctaccgtcacatggagaatccccgagctggaagtcaaggctcccaccaccccaggcgcagacagcaagttcctcgtccgcttcatgacgtccacccccggaccccgcaagggtacagtcgaagcaaggttcgagctccgcggcgctgaatctgcttctcagcttggtatcagccgttctgcctcagaaacagaacaaaaggaagccgaccccttcgctgacgatggccgtgattccccgctgtccgcgacttcctggctgagcgtcccgacttcacgcaagctgatcggtggaaagtatgtgtcttcctagatatgtcttgcgcaatgcgggatggaagtacccatgcttggtcgtatatattcccttcttccgtgcaatccttatgtcacttattcgttgtttggatcttgtgtgtcatccctccagacagggccccaaatcagagcatcaaaagcttaggatgccattacttttttcgttttgttttctttctgcctttccctctttgtctcttgtattccgagtattctcttttcaaataccgatcttgttattcgtgaagtttgttgttgtctgttcgatttggatgttgttctgtgtagtcaggcatttgcttcgcgtacatatgactgtttcaaacacatttagatataccagtacgtatgtagtagtcaagagcattaatttaggaaatctttttcgacccgtccaaaaattgtctgccatcgaaactttgaaagctttggagagtgctttgaaggtgtaaaaaaacaatccaagtttataagattgagttattaagccagctttgagttcgttcctaatcagattacaacatacgccctaacctcggtgcgatatgcagcctctgtggcttgcccttttctcatacctgcttctctattctcgaatattctagaacgagatcaagaagagaagaaacatatgtaatccacagaaacgctgtatctagacctttggctatgagactactaagtctaccgcagcaaccacagagctaccggagaagcgctttacgatcacaaccactgctccttgttctcctcgatccaggctttgaagtccttcatcccagggtagagctgacggcatgcagtcacatcacctccatacccttcatgttcaaaccaacgaaacatatcacccacggtaccttttaacaaaaacttgactgtagaagccacagggcaaggagccataggcataggtgatcccacaacagccttgaacgtcacatcagcctccctttgagtaagctcatcgccaaccagtgtcagggcaacattgcggtaatcatcaggtttcatgaagctgtaagccgcgacccgaccaatatcccgggtcgagacgaactgcagcttcttgtcccccatttgctcccacatgcgggcgaagcccttcccatggatatcggtagtgagattctcaaagaacgtcacgggccgtaagattgtgtatgtcatatgttgcggactggccgccgctctttcgatcaagtgattttcgatatggtatttggcagcaaagttcttgactttggtaggattaacaggcgacttctcagggccaccgcggtcacctgacgagtagacaaagtgttgcacgccatgggcgaccgccgcgtcgacgatggccttcccttgctgctcttcagcgtccgagttaacctgcacgctgtatacgccccatacagggccgactttttggaagatggcctcgggctgcgttgtgtcgccgtccacgacggagacgttgaaattcgcgccaagcttcagcgcgcgggggctgacgatgtcccgcgttacggcgacgatgttgagccccgccgtgtcgggggccgagaggaggctttggatgagggcgccgccttgcttgccggtggcgcctaggactaggacggtctttcgcggggcagacattctcagatttgaaatgataaatgatcaagagttatgaactgaagttggagccttcgctgcactccaaggcttattgactagctttggggcctgttattgcgctagaccaataatggaggaacgctagagctagtaggggtatgactgcatttgttgctccgtataagaattagttttaattgtgtatcagaaatatgtctacctagccaatagagatttcccataggcagcaactcaagcacgctgatatctaatagagaaccaaatgagttgggctagtctatatgcaatagctatcggaggaaaagacaaactcaatctgacggacggcgagaatggtatatggattattgtagcgcagtggctcatatgctcggtgaatctatttatgtttacactaggcctgaagtaatgctatatgttattgggatctatataagctttctttctcacattcaattatgttgcgcccacgaattgatagagaggaaggagtggaatatgtaagaattcaagacctgacaaatataaaagcctcaacatagaatcgttcaattgcaatcgttctcaaactcatcgtcaatgccgttcccgatctgctgctcgatgtagcttatatcgctgaattcaatacatccaaaaccatcgtaacggacggtctgattatttgaatcaaagaatcccccacctagactgtccaagtaaatctggaatgctatcctaggtccgcacgtcctaaaagctttggtcaagcgatataaccagcgccctgtcgcgtagggatcgggggtcaatatctccctgcggaaggcatctcgtagtgtcgaaaagctcacttcctcgacaccgtgttccaggggcctcatatcttcgattctccaagcgaggattgctcgaagtgagacaatcctcaatatgtagtcctcaggtatctcccattcaaatagatattcatgtctgaatacgtttgaatccagcccaagctcctctgcgagcctctgagcatgatgtgggccgttttctacatcggcctttggcactttgatacagatgatccatatcttgtcttcattccgggagttgtacttccccagagcacgattcagagcttcaagaggacggtcggtgacagaaactagggctgtaggatggccattccacctatttcgatgagagtcgaattcggagaggagggcgtgttcagacaatttcggacggccaaagtagttgtcatacgctccggatctcagtccaccagcactggtcaaggagaagcagcgataaaaatattgatgtttcatggtgagatggttgtcaaaggtagagactacgaaaagtaagaagaggcagagagggtttcagccttgaggggattaggctgcaatgcataatagtatatatatcaatgtattgggtacaaccccggttctttggtcagtaagaaaaagtacatcctaagagacgctataattacgagcgaagtagattatcacagaggggtaaactatcctttagactcttataggctgcccagaatactgtactttcatgcttatctacttttcgactttgtgttccccgattgggcaaggggtgtataggcttgccctccccaggatcaaaaaagcgcaaatggaaagatatacatagttatgcggtgtcggattaataattgctgcatagaataactatggataaccgatgacaagacatacaacatagcacacattgacatgtgctggggaatcacaaaaatacagatataaaaaagtagaaaaagccttagcgaacatgatactgatcccacatatcacatcctagcagcgcgggtggtcttatcatagaagtccaacgtcatggccgccaggaaacatggaatatcctttctttcttccacccagaatttgatgagaggtttaagttccatggcaaacagactattcggtccgcccgatatcttcatggtgccgttctcgccatcgaaaacgatagaattttcttccccattgcccatgctgccaggaccagagtcagaaggtgcatcgcagtcgccgtgccgataagcggaggaaaggtgaaacatggaagtgactcgcactctaccattcggcaagaaatcaagcttgaagccgagaagagaggcgacggcttcccggaactcagaggacttagctgtccagatctccttcaatcggcgcatacgcttttctttgtcggcaacgatgcgctccatgtcttgcatttcgagcttgatgctctccacggtgctgaccgggacaaatttgacatcggtacggcccccgcgcagctgtgccattagatctctgtttgcagactggagggttgcaagagtagtcatcttgatttgctcggtttgggccgtcggattatcgcgcagttcaagaatgcgtgttcgtgacttggccttcaaagacttaatctgtgatttggccgcatccagttcccggcgagcgagagtcgtggcctggtctgatttggtgagatgttcctggagcttgcggttcttgcggctgagcacagcgatacgctcgctttcggcttcgctgttagtcggagaaagagctcgtttgacgcctctcgcctcttctttcggtgtagcttcctgcttggagagctcttcatgaactttgtgaagctcactgcgatattcatcgacgagttgttgcagctgggttatttgttcggatttttgttcatcaaactgcgactgatcttcgttcattgtagcctcttccgcatcaaatgtcttaagttgtgcgcgcaggtattcaacttctttcactgcaagcgcacgctgacgctccagtcgagctcgaagccggctctccgcggcgaccggtcctcctgcagaagcggcacccgcaacgcggagtttctccaactcccgttgcagattatttttatcattttcgaggctcttgatagcctcgtccttctcaaggaattgggcatcaacagttccgagacggtcaaggagcgtagcgatctcaattcgtccttgaactaccgccctcacgatggcatctggtgagtcaaattctgcaggctgctcgttttcctgcaaaagactgacccaagattgtcgctcatcttctaagatctgcttctggatctgaactgtattgagttcggcttcaatgcccttcatcaattggagctggttctccactgatctcttttgttcttcgacgacttcaacattcttcgaaacttttcgaaggtgacgtagctccgttgtttgatcacggtttgctgactccaattcccgaatatgatggacttgctcggaaagttctctctttaatacagccaaaacctcggcatcgttcccttcggccttcaatcgaatattttccgcttcgagctcggcgacctcggcttcacgctgagacaatttctcctgcgttgattcctgcgatgtcctggcattttgaatatcggtctggaattcctcgatggtcttttgtagagaagcgcggactgtctctaattcgttgatctggtatttgaattgccgttcctggtcggaaagtcgagcctgagtgtcgtcaaactcttcctgcaagttctgattatcatcctgaaggcctctaattttgcgctcaaacgcaagtttgtcattcaaggcctgatcctgaatttctttcaattcctttgcgagttcgtcgctcttatgggtggcccgattactcgaagattcggcagtctgcagcaaatattgtcagtttgacctcgtgaaaatgaaaattttgtagcagctcacctgagcctttcgaaaatccgcatccgctttcagttgcaggtcgcgaatctctttttcatggcgaagagcctccaactctcgttcctgtttgatattctcgagctcgtatttgagtgtgctcaattgcacgcgtagctcatctttttccgcatctagacgggccagtcaggtatccgtcgaaggcatctcgactttatctgagcagggtatcgtctcaccatgaataagttgatgggactgggcttgagattgtgtgaaacggccggattgtcgcatagtagtcgatcggcgcatggtgctccgtgaaccggagggtgttgggggtgagccgaatccagcaacaagctgggaagctggtcggttattctggctatggtccatctatgaaaagccaggagaggtcagttgttgcgcaaaaataatatggagacccattagagctcacggtaaggttcaggctatcgtaagccccacggaaattccgttctaatgcggcatgaggcgagaaggactgcacaacttgtcctggagccgtatcaaagggaagatggttaaaggcggcaccgccttgtttaggattatgtcagcggtgaacttcacctcaaaagggattagcgcctttttaaaaattatttcgatttcggcatcaaattctcagttcaccaccttcacccgtgactcctctcctttcacctcggtctctcgttcgattttactcaatttcttccgcttaataccccacaaccgctacaatgggcaaggacaaggtcgagaagaaggaccgtgctgagaagaaggagaagcgcgcggacaaggacggtgtgcacaaggtcaagaaggagaagaaagagaagaaggataagactactcttgtcgatgcagtagagaaggagattgtctccgagcccatggagggtctcgagcagaccgctgttgtcaagagtgaggtcgacgccgttgtccccattggcgccctcgtgccgttcgcccacccattggttgaggacaagcaggccaagaaggttttgaagagtgtcaagaagggtacgtggattgtctttttaagtttttacttgcctcttttactatctgtgcgcatggtcgattttcatcggatttggatcgcccatattcactgatcgcatgattgcgcgacttttttttcttatctccagattctccatgctaaccttagttcttctagctgccgtcaacaagtctctcaagcgtggtgtcaaggaagtcgtcaaggctctccgcaagtctcccatccccgctgccaatgctgccatcggtgtccctagcggtgtcgtcgttctcgctgccgatatctcccccatggatgttatctcccacattcccgttctgtgcgaggaccacggaattccctacgtctttgtcacctcccgtgctgagcttggtgcttccgctgccaccaagcgccctaccagtgtggtcatggttacccccaaggctgccaagggcaagaaggaggatgatgaggagttcaccaaggtcttcgaggagcttgctggcttggcccagaaggagatcaagaagctgacagtctaaaaatgttctcgacttgtctgctttaccttttgttatttgctcttcccacgctgttcactgcgagtgggttctctggttgtacaggtttctgataccgtctgttcagacggtgcatgtcttatggggtccggcctatgggtatctttctatatttgctgttttgttccatctcggcgttatttcaatggtgtacgaaaaagggcaagaattccaatgagataccaccaacctgatagactttcggtcatgagtaaggtcttgggtaattccaatggacatccatgcaatttccagccattgtatttccccgcaggcagtgtgacacctgcatagaccacgttatgcctgattgttgtaggagttgatctagaacagccggctccccttgcgtgatagataaacaggtcgcacatgaaatgagtctcgaccccttccaattttcgatagtgtcttaaggcagtcagccctacctaggtacatttgcgcgaatgtaatcagtcacacagcgtagcgaagtcaataattgtactagcaaatcgggtcaacacagcgctaaatatttagtgtgaagagccaagcctagacaattagccttgcatcgtaaaatgaactattaacgtggcgttctatgtctacgccgatcaatatgatcaatccctacgcccctcgaccttgacattgaacaagggatgaagtacctaccccaagcgcagcagatatcagtatcagcccaatcaccatgcgtagcgccctggatgactctgatcctctttcaacactagcctaggtctagggacgtatttggtatcaggcaccggatctgagaatcgggtggtgacttttgtcctacgcttcttccttgtgatcaaggctttatctccccctgtccttaaaaaaatgatttaaggaactatacaccctcattatgcgtcgggcaaatcattctttctgcatgtacggctgtatcatttagccaatttcctttttatatccctggaaatgcatatcaatcgcccctccttcctaacactcgccctcattttggctgttactcaatcaactgcatcccaccccatccgaactagcaaatgcgtcaagatggaacaattccaagaccccaatgctcgtggaatatggaaggtctttgagaaacatgaagaaggatatgatctattaccccacccaccgcacgtcaaatacaacggggtaagtaccaatcctactatgtatattgtccactcggcgacttacctatagccactatagaacccagcatggccaaccaacgaaaaaaacgaatcaacagagcaggacacaccaaatgatcgatatacaacaggaacctccgaatcgggaaagccagtctcaatcctgattctggaatccccagaaatacccgatcaaatgatcctacaatacttgcgcacaaaaaacgctctaaacaaggagcacgaacacacctcgcctccatctttctcccactcctcttcgggtccatcccgcttcaccttcacaactttaagattgaacttcccacagtatcctcttccgggggtttctacgacagtgattactctcctggtactggtttggattgttatgttcaccattgggctgcttgaattggcgaattatctttggagacgaagggaacaagctttggtgagagagtgtgttcaaggtctgtatgatgaggaggaagatgtgggcttcaatgagacaacaaagatgcccttgaggatagttattactcctccgcgaagcaatggactgtgctccgtgggagaatacgaatatgagttccttgagtctgtttctagtgactatgagtctgactgtgagtcggactcgggttcggactcgggttcggaatctgatgagtttgattatcgtatcttttgatagatagatacaggaatgacatgactagttggctcgatggtatgtcttttctttccaagtagaaaaaggcttaaattgtgaaaactgctcttttgtctaacctttgatacatctcatcgttattttcgttgatcaattattgctagtcttataatagaatgcatcgaacttgacaattacatggcagaatttatggaattgaaacagagtaagaataattatattttcaggtgttactgtacatgagtatacgcagtcataaatcatagctcatcatagtcccagcctaggccgagcccagtcaaagcgagctctcttgcatgatcccaatacaaatatgaaactcgttgggccaaatctcaaacaatagactcaaatacgctggtcactctgtaggtgctcatatacagtatggccatcagcacccttctgatgagggcgggcggagtcataagcactgtgcgcattactgcgctcaaatcggttgatagcctcacggccagggtcctggctggagccgatctcagaatcgaagctgacattcttagaattgtcggagggcaagccaccacggttaatttcggtcgcgccgacgttgggctgactcctaccaccactgccgccggtggtagaatattcgccagctttgatgcccatttccttcttggttgcagttggaccaccggcatacccgttttctgacattgtgccagggaagttgccttggccgacaacgcattcggggtacttctgttcctcatgacggtcctggcgttgagcggcggtttgggcggagggaagcttgatggaggcggagacgtcggtgttgtttactgtggattggtctcctgagacgcccatgggctcggcaccacggttggcagagaagctgccaccgtggcggacagactcggcggcaagcgaatcattggttacaggaccagatggttcttcgacgggctgttgtgaacgaggatcgtgggtgaccttggtgccacggttggtgggaggaagaggagtgccttgaagatccatgatgatttgattgattgaaaagggagaaggttagattgaagttggtgaagatatgttcagtagagaagagatgggagataattaattgataaactctacatggccgtgatggcagatctatataggaaaccagtgagctatgacccgtccgcatgttggaagtatatggttctcatcgaactacatcgtatattaaagataattgatgtcatacttacgttaactaggagcatttgcaagatataggcaagctcgatttcttggctagcagcagtccatgtcgactaattatatttgagatactctgtttggtggctggagaaaccgatcgaactcgcatgtggagaacatgctcctctctgatgtattcatgcctccaaaggggaaactatgcccccacctcttatccctgtatctcctgagaagcttgacgttgagaggcgattgacgtcaggtctagaccctggtatgcaaacagtgcaaatatctttatctttactgctgtgcaatgtacagtcttggcatttaattttatattttgttcgatgacggcatcgctgtttttcatagcaacagacttttatatgtttattgtacacaggtatagttttggcttaacattgacactacatgaaaccataggctttctagatctgcactattatagcctccgagtagaaaaaaaaaagaaagacggttggttttttctttcaatagtctatttgatatagtacaaatcatcagcttgaaaaatttgcgattaaacttcgtcgctcataacttgagagaaaaattgactacacataataaaccctcgtgatcacatattaacgggtcatacctagcatcagtcaaggtgtgatgtagtcctcgtcctcgagcccaagttcgttagcactactgccggcaggagcacttccacgcaggccactgttatcaggagggaactctaaacgtccagagccaacgccggtaatacgttggtcgagggaattccagtcactggcaactgggggttgatcaggcagaggcagattggccttaaccctgtcaatttgtgcggacttgtcggtgttttggtcgataatagactatagagcatatgttaggctatctgatttctgcttggcgttgggtgcagatagctcaccttcattctagagacatttgagtccgctggagggttgccaccgtgcaactgggaaagcttggactcggccctgcgaaggtcctggatggtggtatggaaggtagcgttagacattttgcgtccggctgtaaatttgatgatttaaacgaagaagtgtcagaagtggctgggtatgattttgaatctgaagcctcaaggcaaataaggacttatatatctactattttctctgtcgatggcaagacgctgtgacgtctgctacaatgacgccatggcatccaatgccatgggtattctcaccacagaaccatctttgacatgcttcatgttggttgggaattctaggctgttgggccaacagcagagtaattaactgggtgagtcttggggactggcatcatagatgatggaccacctgaggtggcgagcctgctgatgtgcttcaacgacaagatgctaccaagatgctacgcatatgatcccactcgaggcctgtcgaggagccaacggatatcttgaagctagacggccgagatgttctggacagattgtatgcaatacccttcagtccattgattgtcgatgttctcacacgtttcttggtatattacgaccgcgatcgggagccttcgatgaataatcgtggagggcatcatcttaaactcgatcagagcctagtacatcacctatctcatgtttgacaacacagcaggagcccatcctaatcaagcttgcacagacctggaattcaaggacgggtatagatatacagcggctagccataaatttccatcatgaattatagccaacagaccagatatcggtttctatcctcgagttattccataatgatttcaaggcgcgatagtagacgcggtatccactgaaggcttgaagagtagcggcgtcctaaagcggcataaaagcatgcaggtcatggctagcaccgccttcctttttagagcggcagaaaatgtttcttatcgaaagacagccaaccccgagatgcgtggagacttggtgaatcaggtcattgtgttattccaaggatcgtttgcccttcgacgcatctatacttcaatatgggtcgagatccgctgatcggactggtgggaaaggtatgttgttcccctccattgttctcacaccccactgacgaggggcatagccgtctagtggaaaatctacaacattgaacagcttgaccgatgcgacttcgaaagtcggtaagtgaaccgagatgcgattatgaccaactgaaacctaataaattatgttcggaacaggaaacttcccgtatgtgctccccgattgttctacatgagcatctccaccttatcgcattgatcgcgcagaccgtgttgacaaccaacagcttcacaaccattgacccccagcgagccatcggataccttcaaatcgactgcccatgccagcgatacaatgtttcagatcgctgccagcccaattacggagcctgccacgaagggcgacgttccgtgccgattgagttgctggatgttgcaggtcttgtcccaggcgcgcatcaaggacgcggactaggtaacaagttcttggacgatctgcgtcatgccgatgctctaattcacgtcgtggatgtgagcgggaccacggatgctgaaggttagttgggtgtgccggattgaatacaatggcgggatcgggtgttgataaatatcgcaggaaaggctactcgaggttacgatccctcagtagacattgagtggttgcgatcagagatagttcgatgggttctaggaaacttgatggagaggtggtacgtttgcaagtgccaacaagggaacgagggacaagtgctgatctctccttaggggttcaataaagaggagacatcaggcattgagtcagtggacttttccaatgctatttgttacaccgaactgactcttagcacagaggcaaaccctgtcgacacattacagaaacagtttgctggttatggaagtacccacgccactgttgcgcgatttatggataaactcgccttaaaagaaccattggaagactggtcaaatgagacggtggagcttgttgtgaacgcttttatcgacgagaaattccccactgtgttcgcgttgaacaagatcgaccacccagatgcagacaaggtacgaatatttagcttatggcccatatattgttctgacaggaattgcagaacatcagcaaaattgcgaaaatgcaatctcccgaaagcattgtgctttgctccgctatatccgaggtgttcctccgaaagctggcaaagcaggattacatcaagtacgttgaaggcagtgagttcatcgacacgcgagaagatttgatcgagatgggcgacccagacggaggaggcctcaaagagatggacgagaaattgaaaacgtatgttcagtgctcatataaatgtcgtacttttgctgactgacgtcgctctagtcgggttgagaacatgaaagatatggtgctgtatcgatttggatctaccggggtcgtccaatgtctttcccgagccgcagagcttctaggactcgtaccagtgttccccgttcgaaacgtggcgacattcaattctggcactggaactgctgtattccgcgactgtgttttggtcaataagtgagtactctctattagaaggctgacgccagtctaacatttcacagaaacagtaccgtcggtgatgttgcccggaaggtgatgggcgacgtacctatcaactatgtcgagggtgtgggtggaactcgagtctccgaggatgacattgtggcagttgggaaacacgacgtgagtgcccccactaactacataatacggttgattgactgattaccatggcagatattatcgttcaaggttggtcggtagaccagttcctttatgtacagcatctcccataatatgacattagtaatggaaatgtcttatggactcgttctctgctagaatcacaaatttggggcgtcgacttcaccgtcgagctcgaagaacgcatagcccatcacaagatactttacttcaacccccctgattaattcacagtcagcaacataaatcccctatcattcatatggactgaccttttgccgctcatcgttcatgccaatgattggctctggcgcattgggatgctcctccttagccttcttcccatgcttggtcccgcccctctcggtcattccctgtgacttgctgtcatctgcaattccctggtatgctctcctctcctccaatccagaggccactgcctctgaatgtacatcgtctgtatcacctttctgagacctcttgcgtatgtggtcctccgccgaactccctttccaatcctcgaagatggagtagtatcggaccccaagtggtgcacggagaaccggcgggcgtatgacggactgtaacggtaggatgacccgccaaggttggcgtgaaacagacatgttgtgcagcattgatgtagcagaaaagatacagtggttgcgcatagtgaattgcgagtaaatctaaatactggactcgccacaacgttggcttttatgattattcctactgcgtgctatgacgtccctatgctgcaatgcttttctgtccaaaaagggtaagggagccggttcgagcgggcttatcgataaggaatcgatcgtcatcgacgcgacattttaactaagcggacgacaccaaccgccaactcactatgaaacgcgagtatatcccgatcgaatccctgccagcctggcagcggctcagtggggtcgtcgtccaaggcatagaagtccacaagattggatctgatgaacatggcgcagacaaaggcagtgcgctcatcgcaacagaagcccagacaagcagcgagaacgacgcaaaccccaagatcctgctacaaatccccccggaattagttctctccctggaaacagtccataaccatgccaaaaccgacaggtatttgcgtgatgtgttggaggcaatcggcgactttggaagggtatgacccgggctgctcccttgtatctaaagggcaaaaccaactaagatacacagacagccagaggagcaatcctcatatttttgctcattcaactgtcccataccagcccagatctgcgctcaggacacgagaccatcggtgtctccaatccctggactgaatacgtgaagttcttgcctccgtcgttcccgctgcctaccttctacaccagcgaggaaaaggagctcctccgcggcacgtcgctagccgaagctctcgatgcaaagcttacttccctggagcgggagtttgaacagcttcgcgaggctacggagggtattgcgtggtgccagcggagctggtgggatgaggagaccggcgcgctgaacattgatgattggaaatatgtcgatgctgcttatcggtcgcgcatgctggagctacccggtagtggcctggcgatggtgccttgtgttgatatggccaatcatgtctccggtgatggggtcaaggcgctatacgatgtagactcggaggggaatgccgttctccagttgcgatggggcaagagccttcagcctggagaagaggttacgatttcgtgagactattctacgatggacgaggttgtggacttggctgatatagcatgacaggtacggggatgaaaagcccgcgtctgagatgatattttcctacgggtttttggaaagcggcacgacggaagcacgggggattgttctcagtttggatatcccagcggatgaccctctgagcctcgcaaagaagatgttctgccgggagaatccgggcctacgaatatcggccgttgagggctctgaagaggtgacctgggagagtgggcttgcgtggatggcatgcgtgaacgaggaagacgggcttcactttgggatcgcacagacaactgacggcggccaggagttagaaacgacctggaaaggcgagaagatcgaatcagcgagccgtctccgcgagctacttactgttgatcctctgtgggatattttccagcttcgtgctgtggtgctgctgctcgaacggctcgagacccagctcgctctgcttcaggagatggaggagatcatcacgaatttacgagaggacgaggcagatttggatttattgttccgacctggaatctttgcctcgattgcccagttccggaccttggaaggggagctgctggagagggctgttgagggcttaataaaacaggtcagcctacctgggtgtcttacagggcccccttcttatttcttgccactgaccacaacacgcagagaactgagctactggcttctcaaacggtggccgattatttcaaagcacaaacaggggagccggacgaacccgaagacttttcatgaatgcgagagcccagattgtgttgatgggtctaaaggccagactgcagagtacagactagacaagcaattaatatcgccacggacatgttcaggcatccgaagcattcctaaacatccacctcctgcccaatctcgttggctagcagcctgcagccagcccagtccccgccagatcatctcaaaaaaggttgggagccccaccgccccctagcgcatcgaactattccatgtgtagagactagcgtccaatgatgacgaaaggacagggaaaagagaggtatgacgttcctagtggaagatcattgagtggaaaaaggggtgaggaataccacgatcgtagggatctacgtactaccggcagtctattaccgtcagtgcgccagttcagattctgcctgcagcccaggttgtaccaatctcgcctcgaatattgtcgaggcgaattttcatgcttaaatgatcaatgcttaaattctgttagtgttacgtgttgtctatatttatctctatactccatagttacttagtatagtattatgatcatcatcataatgcatgtgacttctcgtttcatttatagtttagttatgatgtggaaattacatcttccaacagctaatagaaatacaagtacaaatagaaacaaaatagaacaggcaatggaaaagtaggcgaggtcaaattcaaattcaaatttcaggtattacagggtcaggtgcatgcggggaagccaagccagttacagacacgtccgagaatcaccgggctggcctggcgttttcgtaaacgaactttggccgcgacgatgacgtgaactcggtatgccagcagcgcgcatagtttcgagcctacaattggaaatgagggaattggctatggagtccgaagtatgtgcatcgtagctgtccatcgcgaaatctccacccgaacggagcccggtggggccgtgacttataaagtatggttcgctgatttctcggacaaaactcgctggacggaacagaacggcactgtggtaagcttaccgaatgaatacgaggcgtattattaattcttaaattgcccattacgagtgctctagtattgtcgaactatatcccgcgtccttggttgggcgcggatgacaacgactgaatcgcttcagttgataggtgcccaggtggagctagtagcgctagtcatataattcacacaaatcctttgaaactctagttgcatcggattgtttttttttccccgcggttgatcccttgaacgagttcgccactgcagtgaagtctatagattacttcattatctaatttaaaccttgggggctatcccggggatttctcgattctcgtaaattagcgtgggattgggtttgggcgtgggcgagatgacttcaggagacagcgagtggccaacgaataagatggtactttgtgcgcagtatccagggtgttcagtatgcgaaccttggaaggatcgcggagttatctcgtgcgtttttttgagtggaaagtgagacatattaaccgtggatggtggccgatcatcggaccaggatttaataggaagcctagccacacctgcgttaatcgacacgagctgcacaacccgggggaggaagtcggaagcgggttgggaattgcccgcaaccgggtaggattcgagtctgcactctaatatgtagcactcgaaaagtctatctcggtactcgatacagacatgtaacccttcgtttttccatattcccatccgcagataactgctgtccaaagagtagaatgtggagtgcggggaccgggaggatcggatccaaccgttcagacataagaaatgtcgactgcaggaagaatccggggcgagttttgagcggtttacggggtaacaggtatggagcaataccgattattagtttaccatacaccgtccagtttattggaaggctccgaggtcagcaggctccactttccactgactcagcgaccccatcttcccgaaggtcgcccccccccatgtttttaggcttctttctgcatacacccatactggtccaattcaaaccggtgattctttagttgcattgtcctggtgtcaataatccttatacacagtgcctgcgtacactcctggcgcctttcaaatacaaccaactcaacccccggtggcccgtgtgccccttctgcacaacatgcctggtatcttgccgatgaaagtgatcaaggtcggtggcactggcaccacgagccgtattgctcaggcctgtgaccgatgccgcagtaaaaaaatacgctgcgacggcgttcgcccttgctgctcacaatgcgccaacgtgggcttcgagtgccgcaccagcgataaactgagccgccgcgccttcccacggggatataccgagtcgctagaagaacgagtccggagcttggaaacggaggtcaaggacttgaaggatctgttggatgagaaggatgagaagatcgatgtcttgtcccggatacattcgtttacgccaccacaacgagccccttctgcaaggtctccttcagcgtgtgctacagtaaagtcgaatacttcggagtcgtcggatggcatgttccatgtagagcgatcgacgactcgaccatccccacaatcgcagaaccctttcgttggattttctagcacacagggctttgctggtatgttatgcgtttccctttgcaggagacaatcaacttacatgtgcagatgtgtttaccaacaagcttgtccttgaggggaaatcagctactaaggtgccgacaagagccctcactgccttgtctgccttggtattccagggtacccccaaccaggctgtgaagacaccacctcgcttggtgtcggaccagttgattaacatcttcttccaagaatgggcgccgctgtacccggtggtacatcgaccgaccattctaaaagcttatgagcagtatctcaacaacacagagaccctgcagcgtaatccccatgtgatggcccaattgaacctgatttttggtattgctgctctttcatcaatgtcgcgaaccaatcaagacccggctttctttgaagagaattggtcggccacccttgattcgttctcgagtgaaacctccatttccagtctgcagtgcttcgctcttggtcagatttattgcatgaccaaaggcgactaccgcaccctgcttcgctaccgtgccctgggtgtggatatctgccatcagctaggaatgcacgaaaaccaagaaagctcgggaaacccactcgaggacgagacttataagaaggttttctggtcacaatatgtgcttgaccgattctgctccgcgcttactggactgcctgtccttttgcgcgaagaggatatcgagactgagtatccggttgatgtggacgatgagaatgttacagaaacaggctttttgccgaccctgcctggcgaatccactcgcatctccagtgccatcgctctcttcggagctgcacggatcttgaacaaggcccttgcagatctgtacccttcaaaatctggttacgatgtgtgtgtctccaaaatgcgctcggtaacagggcaattggacgagtggcttcacacactgccgccacaccttcgtctcgagttcagtcaggacaagcctagcacgaacgtcacgagtagtcgctcgccgctcctggtaagtccccgcatggattcattaatgttggcagaatactgacctgttatagtcacttgtatactatttcattcgatctttgattcatcgcccagctgtctgctacgctgacgagactcttcgctctcagtctgttctagcggtgtccgattcagcaaagcacatcattcagattcttgaacttcttgatgagaggcgtttatgtctgtccgtttgtatcaacaggaaagagctcatattcctttccggccttggactcctctggcaaatccttgatatcaagaacgatagcaaactggccaaggatagccagaagctgcttggcactgccatgcaatatctccaatcagagtcgagcgcggcggctgttgaattcaacatgctgtccaacactctgattcctctggacggcggaagacgcccttcagtgagcaatcaacaccaggagatggtggcgccaacacaaaagccccgaaaatcccccaagaagcacttgcaggccctcaagtctcgccttatcgcctgctccacccgcgataagcagcctcccacccaacaaccctctcctcagtcctcccgccgtaacaccatctccggaaccacccccccacttcttccccagtcgctccgctcccctagctggagcagcctgcccctctctcaacctgaccatctctccggcccactctaccacaatgacaaggcgaattctcccttggatctagcctcagaccctcgcttatccgcatccttggggtacgaccactcacgcaacatgtcctgctctacaccctccgacccccaagctggtgtcatcacaatggccgattgggaatatgtgctgagtgacatggaccgcggatactccaacatcttcacaggcatttatggcggcaaagaatgcggcgaagacccgggtccgttcgcctcaattgcagcagaatacaaccgcaaacccaacgatccctccctagtcaaccacgcgcagggtgagatgcacgacctctcgcccgaggcgtggtccgccagtagtggcgacttcgtacataaacaagaacataccgcgcagagcgtcctgagctattcaagcgagagcatgggaagcgccgaggaatctctggcgccttatgccgatgtccgggtctgtcctgaagatatgaatacgatggacccgttccatacttttgctctgcatggagaatgagctcgatgagtttctttagtcgatgggtgggaccgactcttgtccgtctgattagttatatagcgctgggtgtctttttggaaggatttgggtttgacgcttttctgttctattcatgatacctgtggatgggggcgttatttgcgtttttttgtttcgatttctgtctggtattttcctccatctgcctttggtcttctctgtttggaaacatttttttgtctgtcgtagtagtacagtatgcttggggataggcgacgtctaagatgtcgtacacatgaatttgatgatgatcaaacactcgtttggacctaatcgcacctgaagtagatccatatgatccatataatattcctacaagcataaacaacacagcgcttcggctcttggtagcaatactttgcccctcgggtcttcctttccctagaggatattgttgtggaacatcgcatggattgtttgaaagagcagctatcctcgtgtagcagctggtcgatgagaatggtccttcataaccaattgcagtttgatccgaggtgttatgccgctgagtcagcgggaaattgagagactccctgagcggcatgattggtaggcctcatagtataatgtatcccagagatatcgttatacttatacttcgaatggtgcaaccacttggagtgaccaaggtcgcgtaaatatccatgggtacacagccagtaagaagcacagggatcggcttccgacaatccctataaatgcctcttcaggggaacatcaatcaccattgatactttatcatctcgaaccgaacctaggttctacatctcctaatctgacgtccacatcaaactcatatcccaaaatgggcgcgtggaaggagatccggcctcggtttttgccagctgtgattaccatgttcctcctccttcaggtccttttcttagtgaacatgtgctatctttatgcaacgcagttccgcagtaccacccgttatcacaacttcaatgtgctctatgttgactatgacggcggtattatcggaaagtcagtgtcagacgcctacaaccaactccaaggcgacgggttcccaaccctgctgccaagatcttctaacgaatatccccagccagaggatattcgcgaagccgtatgccgcggtaagtactgggcggctatttacactacctcggatggatcagctagtctggaatcagcgctggcaaacgggtcaaacccgccgacctcactcacctacatctggaacggggttcgatacccagtgttctcgcaggcggcagtctacaccaacatcctgaaactaattgcaaccacccggtcaacatactatgccaacgctggatcttcaatagtcacatccgccgacttctctaacgaagccaccctcaaagccttcctcgaccccatccacgctgcagaaatcaacatcaaaggcacgcagcaaggcacaagaatcttctacaacacagtctccatggtgattccaatcgtccaacagttcttcttcatcttagcgctgaacgggatctcaacccatctcgatgcattcataaacctatcctggaaaacaaacgccctgatccgcgcgatagcctctaccatctacgccctcacaggctcactgttaatggccgggtatatctgggcgttccgggagtcgtggggacagcaaggaagtcggttcgtgctgacctgggtcataatgtggctcttaatgcacatcaacttcctattcttcgatatcgcgactgcgtttatcccgattcagttcatgccgtttgttgttctgacgtgggctattctcaatgtcgctagcactatcagcccatttgagctgagtcctggattctttcgatggggatatgcgcttccgtcttatgaggcgtaccaggttctgctccagatttggtcggatgggtgcgataatcggctatatcgggcgcttccgattatgttctcttggtggattgttggtgttcctgttgcggtttatgcgatgcggtaccggtgtaggactgctgtggcggcacgggaagtcttggatcgggcgggactggaatgtcagtcggaaggtaaacatgcagtcacgaatgagacggtgctgccgatcagtagctcgggccgcgaatttgagcaccgtgcggactcgattgagcctgttgttcctcttcttcatatcgcttaaatagggagctatcctaatgaaagtggctattgatggtcatcagaatttggaaaacttgaaattgacagaaaagaggaagggtggaagatgacttggttagcgacggtttgaccacctttggaggccacgacccatatttcgaagtacactaattgaccgagattctcccgtaaactctacttacggtgggtaccgtggcatggaacagttggaaacttttgccttccttttgcatagtagattctctgagtcggaggacgattgaatagactatctagcagaagattatgtggtctatgctacccaataagacgtctagtagtaaggactataatttgatcaaataatccggttacgtacttgaacatttgggtttcaaggtccaatagaataatgtaagccctatgtcctagttatatagtaatgtgaataaaagcaaaaatggacatggactatactcagctctcacaaaagtacagctaggaagactatcacacgtttttctgcactcactagtctatttatttatcgagatcactcctggtttgattcaaaccagtcattattgcgaggttgccatgtctggcaatgccaagctttgtggctgccaccgattacatcactacttctccagacctcgggaccccagactaccgcgtggctgtttccccggaatcttcttccttcccacaaaaaacaagaatcgcgggggcccaaacgcggagattttgccaccgaaagtcggggacgtggagtctagggttgacatgccgaccaacagcaacgacgaaccacccgcacaccccgtagccgacccgggagaccttccaaatccggatgatattccccggactatgtctttcttgcggagataagcgacaccgcgaagggcgcgtgctccgggtttcgggtcaacgtgtcatcggtgcgaggcgtccttcccgactcggtaaccatgagtcctcagaacccggcttccgtcactgtgcatgttgcctagccttggctttcttggtcaggcacggttccctataagaaggccaatccggtccggctttgatttcgaaaattcgaaaatcagttgcgaatagcagatactacgggttaagagtactcgctggcgctatgttcgataaaatcctcaaaaagcgtccgcaggacctctatgcagactcccacgtccctgcaaatgaacaggagaatggtcccggtgatgtcgtcgacacgcctattccgctcctcacgtggcggtcgttcattatgggcattctcgtctctatgggcggtttccttttcggttacgacactggtcagatctctggcttcctggagatgaaggacttccttgagcgctatggtgaaattcaatcggatgggacttatcatttcactaatgtccgctcgggtctcattgttgccttggtaagtagttggctctttatcatttattgctcatatgctaacacatccaacctacagctgtcggttggtaccctgattggagctttagtcgcagcaccgatcgccgaccgcttcgggcgaaagtggtgtattagttggtggtctctgatggtgtgtgtcggagtcacgatccagatatcctcgccttctggcaaatggtaccaggttgccatgggccgttgggtcgccggactcggagttggggcagtttctctactcgtacctatgtaccaagccgagtcaggaccgaggcacattcgaggatcattgattaggtatgtcggaagccagccctatggtcattctgtatcgctttctaactcttctcagtacataccagctattcattacacttggaatcttcgttgccaactgtgtcaatttcggaactgaagctcaacccggccccagttcatggcgtatccctatgggtatcacatatatttgggctgcaattcttggtgttggtatggtgttcttccctgaaagtccacgttacgactaccgccatggcaaggtggagaaagctatgaacaccctttccaaagtctatggtatcccttgcaaccaccgcgctctacatatcgagtttgatgagatcagacaaaaacacgaggaagaaaagctcaacgggaaggtaacctggattcagacgttcagtgctccgacgatggcgtaccggatcgctgttggtgtcgctctgcaagctctccagcaactgacgggtgctaattacttcttctattatgtgagttgaatctggtataatacagaggaaatgcaaccaactaacacctactagggaacaacaatcttcaagggcgctgggatccagaacagttatgtcacgcagctgattctaggcgccgtcaactttggatcaacgttcctcggcctctacctaatcgaaaactggggccgacgccgttctcttataaccggtgcgctatggatgttcgtctgcttcatggtcttcgcctcggtgggccatttctctctggaccaagagttcccagagagaacaaaaaccgccggcgtagttatggtagtctttgcctgtcttttcattcttggctttgccagtacctggggtcccatggtatggacgatcgtcgccgagctgtttccttcgcaataccgcgcgcaaggcatgtctctggcgactgcatccaactggctctggaacttcctccttgccttcttcacaccctttattaccggcgctattgacttccgcttcgggtatgtcttcgctggatgtctctttttcgcagcggctctggtttactttgccgttatggagggacaaggccgtactctggaggagatcgatactatgtaccggatgaaagtgaagccgtggaagagctcgaagttccggttccctgctaatccagaccttatccgggcctcattggacaaaaatgagaatgctcctatatcatctcatattgatcttcctactgagattcgagaagatgggtcggcgccggagaggcaagcgcaagcatgagcgcggttgtgcatgtaccaatagtcttgcttgtttttctttcataacatcattttttatttaattggtcggcatatagcttgcaccaatttatattttcaaatatgtcgcattcctaatgtcccgtaggatattctctagagaactggatcaacctcgtctgtagacttcttcacaagaatcccatccaagtaccgggtcagttcgtccacatcgctaagttcacccacccatccgatatattgatccgggcgaacgaccaccagcgccccaagaacccggtcaactccccacttctcatatgctgttccatcgcaatatcgatcaaacatgcatgcatcatcacaccaaatcttgtcatatgcccacccttccactggatcaaatggacgcagaatctctgggaaatcaaagagttctacctctttccacggcgaagcatggatggtaaagacatcaacaggactcttgaatcgaccaggaatctccatgtagcggttgaaaggcaaactgcttgatccagactgtccagccaaaccctgagtcaaagtctcaatgcgttgcttctgcgttgggtttcgaatatctccagccaaaactagaatgcgaaagcgcccatcactttccaacgctcttgttgtccatattgtaccaccaccagcctgattgcgaagctttgccggccggaccctctccccaggaatcatatgccgcgcaaaaggaaatgtagcattatcttcactcttccaaacaagactgctcgcagggtaaaacaccttccatccatcggcaaagtcctcaaacttccccgcaataagagccatatccgacgccttcgtatccgctccaggtttctgatcagtaaatataggcgaccaatggcgatcgaagtcaagcaacatttccgcaagcggatgtctctccaaagcatatgtcccaagaaccttcggcttgagagtacccgccacagcaagagcaaccttccacccaacattaaacccatcctgcatactcatattcatcccaagccccatcttgggtgagtgcgtgtgcaccgcatcaccggcaaggaagatccggttgtcttttgtggattgggtggcgatccgctgtccgacttggtagacagtccaccaactgcattccttgaagttgaaggtgaagggggcgaagatggcttgcacacgttctcggatgagatccgatgtgattttcgagcggtcaaagcggtcggttgcgcccgcttcgcaggtttgcacggggacgtagaagcggactaggccgcgctcgcgtgggatcacgaggatcgtgcctgcggcgttggttacgacgcttagacggcggacgtccgctgtggaaatgttagtgggaagggggtgcacactgcgggtattacttacggaagtcgctgacgggttttacgtctatcacgcccctgtatatgcgttatattagctgctgtagcatgggtgggtaatgtctaccactaaccatatatggtccgtgttcgacccttccacggggatgtttagctgttttctggtccagctatgggctccatcacatccgattagatactttgctctgattgtctcgacctgtgtcttctgtggctttttacgcggggctagatcggcccagtcatcaggaagcaggttactgcggttcacctcgatgccagccacttcggtttcctgtccgcacgacgaattcgaatcatcttcgccaagaactcggaccttgacagtgataggatatgcgtcgggatcattgctcagtttctcgtcgtattccaaagagtcggcgatcacgctccgttccacatcaagatcagagtgctcccgaatactatcgagaaggaaccgctcaatgcgtccctggttcaagcatgtattgtggaagggagactcatcgaccctaaatatgtcaatctgagcttgtcggacaagctttccctccggtccgggaacctatttgttggtatcgtcaggcaagcctctaatattggaaaacaaggtgatacacacccaaatgttcgcctcggtggagatagatccctcttgcataacacgatgctggaaacccatactgtcaaacaactccagcgtgcgcgaacgaagcccgtctgcgtggccttgaaagactttcgtggcacgattgtcgataatgcgtgcgttgactccgtagcgagccatccagtaagccgccataaggccggatggcccagcaccgatgatgagtctgcgataaatattagactatgttaaataaaggttgggggaacttacacatcggtttgggactgagtagactcttgttctttgtccatcgcgacaggatatatatttctgagcagatgctaaatgatgacccgtagatagagacaagaacgattgtccattcaattcaactatcctttatataaaggaatgtgggcttgctgcgctacatgatcctaaacgagagggccagccccatgtaaagctgactcaagtcacagacaatcctaggattacagaacccaaaatcgatcctaattcaagggtcttccgtgttaatttattcaatagttctcttgtaggctccatatacgacgagatttataccgagcccggatcaatatgccatccatattagtcaggtgccctggtttcctgttgtgacgtggagttccagcagctgagatgagttggcggatttttaatgtgcccatgtagcgcgagctgacctaactgcgatgttgctcaacatgggcttggatgattggctttgagccgggggatttccccgaacgttcccctcacacctcgtcggagttgaggttccgggggtggcgattgcatcgggaggccgtaaactccttgaatgcttattcatggtattgatcaaggaggcaacatgaatgattcgacgcaagcattaccttcagaatttgatattggactggagtttctcatcttttaatcctgggtgacagtgacttcctggggaagcacaacaagggtctgggttgggtgtgtactcagatgggaggttggctgaagacaggctgataccaggcaggcgagcccgacgtacatgctaaacagatatctcgtattttgacagaaaccacaatgcctaggatgtgatcacgtagatgtacagttcagatatacttcgcacgtgactggatgatgtctcccgcgctaactcttcttccggcacaccgagacgttcacgggtgaattcccccgtctcagcgacgacatactgtgggggtcgcgttataaattcccatggattgccattccacttatattcgcagatttatcttgtcattggtgtcacaatgtttcttcggactggcctaattaggaaatccgatgcacggccacgttgacaagtgtcaaggagctgtcaaggagccttcgaggcaggccatcaaagctttttttttcagtcgaccagctgatcatcggcacggttattgaggagtcatagatagaaattcggctaatttccctccgtgaacaggccggttgcgagtcggagcagggtcctccggacggctcccggtgtatactagaaggaggtgtggatggaggagtgtcggaaatgcgggccattgaggtgcagacggaataaacggctattgatgcgtttcgagacaagtgcagaagtggtcgagtgcatgttcatatacaatgtcgttgcttcatacatattcatgccctcgttgatgactcatcccatagggtcgagaggtatagcagctaagcagatacctatacaagtctagagagggcaattggattgatttagcatttcgaacgagacagaaatacccccgtaaatagatttcctccataaattctctgctgaatgcgatctgaactccgtaagctaagttgctgggctgcaggcctccgcctcccccacccgacatcatacccccaccaacaaatacgttcccctccctcttctcttcttctctcattcatctccccaaatcctcccctttactcaaaaatgtacgtactgaactgacttcttgtggttttcctttctaacggtattagaatccgccatcatgggttacactgatctggaccatttggctgtcaacaccatccgtcttctggcggtacgttaatttttcccgggaaaatcgccacgacgttctacgcgctcaatggagctacattggggtcttggacctcatatgaagcttcgatgcgtgcagtctgggaaatctgactaacatttatctcgctattaggttgatgccgttgctaaggccaactccggtcaccccggtgctcctatgggcatggcccccgtggcccacgttctctggaacatgatgaactttaaccccaagaaccccgaatggcctaaccgtgatcgtttcgttctctcgtatgtgctttcctccgtctctgaaagctaggcgggttctttccatgcgaaaaatcaatggccgcgcttttgaataccggctaatctcaaattggataggaacggccacggctgtatgctgcagtatgctctgctccacctgttcggatacaagatctctttggatgacctgaagaacttccgtgtaagtccctccaagccatatacaacagccctgtactcatttcagtagcaactcgacagcatcacccccggtcaccccgaggctcacgacacccccggtattgaggtcaccactggtcctcttggccagggtttcgctaacgctgttggtctcgccatggctcaggctcactccggtggtgtcttcaacaagcccggcttcgagcttttcaacaactacacctacatgttcttcggtgatggttgcgctatggagggtattgccagcgaggctgcctctatggctggtcaccttaagcttggcaacttgattgccatctacgatgacaaccacatctccattggtaagattgactcgagtaccgcaagctagatatgaagggctgacagcttatctctatagatggtgacaccaagtgtgccttcactgaggatgttatgaagcgcttcgaggcctacggctggcacaccgagtgggtcaaggatggtgatcacgacctcgagggtatcgaggctgccatccgcagatgccagcaggttactgacaagccctccgtcatcaagctgaccaccaccattggcttcggctctaagcttgccggtaccggcggtgtccacggcaaccctctcaaggctgaggatgctaagcacgtcaaggcacttttcggattcaaccccgaggagagcttcgttgttccccagcaggtttacgaccagtaccacaagcacgccgcagagggtgctgccaaggagcaggagtggaaccagctcttccagaagtaccaggccgagcacaagaccgagggtgcggacctcgctcgccgtctctccggcaagctgcccgagggctgggagaagaagctccccgtctacaagcctactgatgccgccatcgcttcccgtaagctgtccgaggcctgcctcgaggctatccacgacgtcctccccgagctggtctctggttccgccgatctgactggctccaacaacacccgctggaagaacgccgttgacttccagccccctgaccttggcatcggcgagtgggccggtcgctacgttcgctacggtgtgcgtgagcacgccatggctgccgtcatgaacggtctggctgcctacggtaccatcatccccgccggtggtactttcctgaacttcgtctcatacgctgccggtgccctccgcctctcggctctgtcccgcgtccgtgtcattcacgtcgctacccacgactccatcggtctgggtgaggacggccctactcaccagcctattgagactctggctcacttccgcgccatgcccaactgcatggtctggcgtcccgctgacggcaacgagaccagcgctgcctactactccgccatcacctccaagcacactcctactgtcatggctctgacccgccagaacctgccccagcttgagctctcctctctcgagaacgccctgaagggtggttacgtcgctgtcgacacccccaatgctgccgtcactatcgtgtccactggttccgaggtcagcatcgccattgaggctgccacatacctccaggagaagcacggtgttgctgcccgtgttgtgtccattccttgcttcgaggtcttcgattcccagactaaggagtaccgtctccaggttctgcccgatggcatccccgtgctgtcggtcgaggcctgctgcaccatgggttgggagcgctactcacacgagcagttcggtctgaaccgcttcggtgcttccggtccctacaaggaggtttacgctgtaagttatatccgctcatttgtccatgatcatttactaattatttgcagaaattcgagttcacccccgagggcatcagcaagcgcgctcttgccaccatcgacttctacaagggcgtccccgtgcgctcgcctattaaccgtgctttccagcagatcctgtaagggacggaacgaatatgacgtaacaaaatgttttggtttttttaatagggcaactgccatctagatatacgagaatgcgaataaagcactctattgttcacttatcaatctagtaaccttaacagagtaatcagatgcgtatatttatatctagcagactaaatcacaactcttcccagttcttcttttgcagctccagaacatccctcagcatctcttctttcttcgtcctcttcgcaagagtataagtcccataagcatcttcagtctgcttaacaaccaactccttccacggctgctcgccctcaatatcaatctggcccaggtcaccccacacatcctgaatcgtcggcgcaagcttctggaaaaacgccccaattccaccctctccaccaccagcatgataactctcaaacacaccacttccagcccaccgtgggcccaaactagccttaacaagaatatccaaatcctccgccgagacaaccccctccccaacaagataacacgcctccctcagcaacgcaaaagcaagtctattcccgacaaacccaggcatctccttgttcagcgtgacaggtcggtaatgctgcttagccgatggatctgcactcgagccagcagcaccaacagcagccccaggcccaggaacctcgctgaaatacttcttcacaaactccacctcctcagccttcgtctcaggcccaggcacgacttcaataagcggcatcagatgcggcgggttgaacgggtgcgcgatgaccaaccgctcagcaacaccctcgcacccggctgcctgcgccgacgcggggatcccagatgaactgctccacaggtgtgcatgcgggctagagagactggcgacttccttccagagcgcctgtttcgaagctgtcttttccgggctctgttcctgcacgattgtcgcgttttcgagcgcgacactcaggctggtggctagtttcaggcgcgatgtgcggatcagttcgtcgattatggtggttgattccgggcagtccaggagggaggggagcgtgcttcggatctgggactcgtagtcggggcgtgggtcgtagactgttatgctggtgtcggggcggcgcaggtgcattgctagcattgagaggccgattgtgcctaggcccaagagggcgattcggtgggggtattctgtggccatggttttcggatttcggaggtttcggtttcttgaaggtgtttggaatgggaggagaggaagagggaccttatagatagctacatgtagtttcggggaggtccgccgataagtggggactggaggggctatgcggcgccgccatgcggcggcggctggcggacctcgggaggggattgtctgtcgtgcccaggctctcnnnnnnnnnnnnnnnnnnnnnnnnnnnnnnnnnnnnnnnnnnnnnnnnnnnnnnnnnnnnnnnnnnnnnnnnnnnnnnnccccggaggggggggggggggggcggacctcgggaggggattgtctgtcgtgcctaggctctcatgagactccaacgcgatatgatgagggacatgtcattgaatcaagacgaattggcgtctcgttagaaccggtaagatcaatgtatgaaaccagtcggatattacgcgtatataccttatgtttctggagattctactatttttgatgctgtgtggaaaactgactctacgagtaggttttggcattccttgaagtcacccgacttccattttggggtcaagtccagattgaataatcacaggtcatgaaaatccaactcacatgccacagcacatagaacaatagagcccacagaagaatgggggtggtatactgtttggatgcagagcagcccgaaaaacgctgacccaggataattatattgtctccgtcttatgctcggacggggcgctattttccaagtccgcaaatgcaagccccgtgacttgatcgagttccataagctcatccgcgacgggtaaagattgcccaaaaatattatcccattcaccccagtcgaaattgagccctggatcgatcattaagggggcgggctcagaagcaggcattgcgttcggtccggcggtgtccaagaagttcaccataggagagttaacgagggattgttgactcgacatagtagcggcggaggaacgaccaaaggctgagtcgggagcaaatgctctgtcgcctgaggatagggggatatttgcggatgacattgatttgaagtaaggtgcatttgcgaaattggttgaccgatcttgccccgtccagggcaattctgggttcagaccggctttctgccaggcctgttggcgcagacgacggatcatgccccaggcctcgcggcctccattcctcaacgggcgttgtgtgaagatgtcatctccgccactcacgacacctccgtccggtccacaaagagacagaatttgatcaacaaatccgcgtgacacggaggcttcggggctatatggtcgttcatacaagtcgatgagaatgatcctagatctagttagcttggccacttaagtcgagctttcgacatacatcattgcatgcatgggctgatggttccttggtgatcattagtcaaattcttatttgaacaatcggaatgctcacccaggccagccccattgaaacggctgaaagtcagggtccgtcgccaatcgaataaacttctccatgaatgcatagcaatggcgtagcgcactatttggattagatccagtagcccaatgagtcgcgacacttacctttgtcgtgctactggccagattcgacttcgagggttcctgaggaatggttgatacgcaacacaaaatgcctacatccatgttagcgccgcacgggattttggcattaaaataccgaccttatcaatgaacaatgacagaatgatcttggtccatttatgaaatgcgacgaggactgctgaatgatattgctccgggcagccagatggaccttcaataggaagttccgcctcggtagaatgagaaactcgttttggagacactactgttctttccgttgccgttgtctctggaattcggtttatgatggagttgagtttgacttgaagatcgtgaaggacagagcggagctccagcatatcccctcttgttagaggcttcgtacccagctgaatctttagtactttacgaacagactctgcgaggaggtcagctcacgcgcctaacatttagacccaagatcactcacgggccattatgcattttgcctttgcgttcagataatacacatttaccatcgacggcccaccacagacagtcggattgtctgggttatcaggtggccgttggccgtcggcaacctgttgttcatatcttttggcttcggcagtacctaataaggtatccttgacctcgctggtctcacgaacgtcccagtaagtcgtatcagtaagcaatggcggaagcccactcgacatcgcaataacggcatccatatgcatgatatgccaccacactcggcgtcggaactctgcctcccatgggtcgatattaaaatgggcgggatcccgatgtaatcccaaggtctgtgccactctcactgctaagctaacaaacaaactacttgccaaaggttcttcctctcttgacaaaattgtctgcgcaacaagataggccgccagaccatgaagtgtgacgctgtggggaaacgaaatcttggccaaccaacaggtgacctcctcgctatactttgtcgagaggacagcgcgtgacgaagtattgaactccgtttccatcgttctcatagaaattgtgactgagcctccaaaccatatcgcgtataggagtggaataaaagaagaactagggcatggctcacccgtatagcttttgccgtcgtaccagtcccaaaaggctttataacgtcttaggatcgttggagggtgaacaatagggctcagtgagtggacaccagacatgaaacccttgtagagaatatcactctgccattttgttggaacatgctcaagcatatatggctcgaccgatttatcatttggtgataaataggccgatgggatgcaaacggctttctgaaggggttctgagaagccgacaggaaagggggagcgcgtggttcggctcgtagttcggctgctcatcgattctttccgctgtctttgcttgctagaaacggaatcggttggggtgtcactacaggttgctatatcatgcggctgattctggtttccgagcaattgattgagctcctccatttcatgggaaatataagcccaatacgttgtcccgacatatctaaacccaaggttagaaactcaatcgcactttagcctagtgtgtcgatactgaccttgacctcccgccatcccccaaagacatgtggcccaagtttgaagttcccagtggatcaaccagatccgtagtctggccatttggaatggggaagtcatcgctgctacagtcagcagcagcgctgaatggactgggcggttgcgcgacgatcgatttgctccccaaactgccgtcctccatcggcgccgtttggacgccagtatttaatgcagccgcttgcatctctgtcgattcgttcgcctggttatccttccgtagtcgctcaacgagcgatacgagttgagccagatgggcttcaactgcgcttaaatctgttttttggccttttgataatgatccctgcctcgctcggtcatagatcggcaggggttcatctgtattttcctccgactgtgggatatctctctgccgtttggctctcactcggcgagtacgtttggctcgcatcccatctttctggatctccgggtcgtaggcgcattcggtaccatttttcgcgcagtttccgcatactgggagtgtctaacaagaaaatttcagttcaggcaacttggtcctaggccagaaaaggttaccttgtcgcatttgactttgcgccgacgacatgtttgacagctataaatcacacgttttcgggtaatgtgtggatttcctggcgccgagggcgaccttggcggttcagtggtgctagacgggttggagggccccaccacaggctgcatattcggcgtgcttcgacaatttatccgtctcttttcattgattccgtccagtgaccaagtagaaggaacatggaaataatcaaagagttacgtgtgggacaatccaacccgcagatgtcggggataattgcgttggtactccgcagtgggaacgatcttggcactctgacgtcgggcccaggttaccaggtggattactcagcacggtctggacgaatcaacctcccacctggaaacacgcatcgattatttgacctaatatgccaattcgttctaaggtcaagaagatctatagggcaagagagtaggttattgcttatgtttgaggatgtccagaagcaaaaaagtcgctcacttcaatacacgacacttgccgatgggcttcatggtcgtaccaatcgatgatacaccaattgtcatgagaaggcacttctgaagaatcgcttctggaattaattgtaatatactgacgtggagtagcacataggctagtagctgtccgagaaatggccaatgttctactcagcaagcgtggttcaatcggctaggcctaatccaatggcctctcattcaatttcaagattggaattttctaattcactaactactcaggcacagtcccgcattccatgaaccatgaacttggcgtgtttgttgtagtttgtcttcccaattccagcaaagccccagaggcaccaaaactggcgacgggaagatgttgtttagccgaagagcaagtccaatgggtggtcttttgtccccagtgtccccagttccgtctactgggcttttcatttattgccagagaaggtgataccaggccaaaattgcggttggtcgagtatggtatggcgttcgggatattggtatagtttgtaggaatagatgtcacctcacatttttgcgccagggcattgtaaaatgtacatttcgcagccgacattggcgataataggtcacgaatatctcccacctatgctttcaaacgaggtacatgtacggagtaggttgtttaagagatagaaaggctgttactgccgttcctgagggcaccttccccactaacccccaccaacccccactgcccggacaatggccgtgctttcgtaacttggaaggaacgatgagacaagtctgagatctattctaatgtgttctcggccgagtgagtcattgttcttgggctagcttctgctccttttgtggacctaagagctaagaagaccgtcgcgacaatgtacaacatacaacaacagggcagggccttgagtctaagcccagttataaggattccacattttacaaagtacatgatatattgtagtcggagtaattgttactgccaatccccatcggaaccatgtcaaatccgttatagcttcatcgtagatctcttgctagcacccaatcagagccagggatggtagatgagatctgggacataatctcacctcatctcaactgcgagcttactctagatctaacaacgggtctaccccactctcggttcagcctcaaagcttatttgtgatcatctccaagtccgagccactgcgtatgttgtatccttatattgtggttgtttttcagctcccctttctcggatgatgacgaaagaagatcgtgattatttatcgtacgacactcgcatgtcacatccgctttcctgtttggctagagcgtggttctcggccggatgcttgttgacagaatggtgccttctcggccgagagaatggcagcagccttctcagtcagctatgtacataactagtcactctgtgagcgcacaaatagttcggcccccgcattctacgaacccgacccgcaacggtataccgagagagttatgatgggtcttcaacaccgaagacttgtatcatgatgaaatttatggagcccagatcgaaaagttcttatcaatcaacttgcaattgtaagtgcatagggctagcatggtgtattttgtgttgacttatccgatcgtcgtggcgttcggtgagtgcccagtgtacaaacctttcgggtttagactccatacaagcttctcattattcttctagtagctagcttctttttcgccacaatgatgacaagcgttgggggccctgcctgcttattcagaacctgcagcctatgtacccgtacgccttccttcacagcccaggataaactagtagaaagtgaaaatatctagggttaacatattcatcgtagttatgcaagtataagaaagaagctagagtatctatgtttctctccggatcgtggcggaccaaagttgttgactatgaaaaggctattcaacgagatgacgtcgtgatgaatctcggccgaacatacatgacaataaagaccgaacctgcttgtagctacactacgaacccaccaattataatcaatttcgaagagctccattaatatctcaagctttgcagttccgcaagtataaaagcagcttctattccccgattcccgccatattcatctacaatccacggtccattcacaccacgtctactcaacttttctgttatttacatcatcaatcatgtcacctcagcaggacagcagactggagagcaagtccattgctcaacctttggccccatttacatacgaaaaccaggtgtaccaagccggtctctcgggccagaagcccccgataaccttcaactgcggcgattgggaagccctggccaaagatcgtctctcggcagattccttcggatatgtttggggttccgccggaactcgtgagacagacgacaacaacaagaaagcttttaagaaatggggaatcgtgccgtcacgcctagtcaagagcggcttcccagaccttaaaacaacacttttcggagagacttttgactatccgatcgccatggcaccggtgggcgtgcagcgaattttccacccggacggagagattgcgtcggcgaaggctgccgagcaggaaaatgtcacctacatcctcagcaccgcatccgctacaagcatcgaggacgttgccaaggctaatggaaacggatctcgttggtatcaactctattggcctctgagtgagaacaacgatatcaccgtgagcctgttgtcacgggcgaaggcgtcgggttataaggtgctggtagtcaccttggatacgtacattcttggatggcgccccagcgatctgaacaatgcatacaaccctttcattcgtgcagacgacattggtgtggcactcggattctcggaccctgtataccgccgcaagttccaagagaagcacggaaaacccattgaagaggacgtccaaacagcagccgcagaatgggcacacaccgtattccctggtctaagtcacggctgggaagatctcaaattcctccaggaacactgggacggtccaattgttctgaagggaatccagacggtggcggacgcgaagaaggctgtcgagtatggcatgcagggaattgttgtctcgaaccacggcggacgccaacaggatggaggtattgcgtctttagatgttttgccagagattgtcgacgccgtcggcaatgatttggaaataatctatgactcaggtgttcggtctggtgccgatatcataaaggcattggcgcttggtgcaaagatggtcttaattggtcgtccctacatttatgggttggccattcagggtgagcagggagtacgccatgtgctaaagagtctcctaggagatttcaatttgaccctccacctgtcggggatcagttccgtgtctcccaagcatctgaaccgatcggtactgcgtcggacgggcaactgaagatttgacaattagatgataagacgatcactccggttatacagtttcagtttgaatatatagaatatgttctttgtattaatatcaagtactatagatctattcaaagggcatgaagacaactgatctgtgcagattcaagagtattctaatacaccatatctcctttcaaaaaggtggagaccttataaatatacagcagagtctatattcattttttcggaggtagcctacgctcatagccagtagtacgttggcgtgccttttgttgcaatggttgagtgtatccggagaagagtccatgatgtaacaatctcaaagattttggcaatatatatcggcggacaccaaccttccattactaggtactgcaaccacgagggcagcctttatcgaaaacctcctttctgttagaagtgaggtgctcggaatatgtatgcctaactcgtcatttgacccattgacgggaagatctagatcgtggggtggaaatataagaaagtggtttctactcccatctagtcggagtatttttccatgtcctcacatagttcctccagatcaacttgatatcatgaggatagttgaccgacgatgtttgtcaggaaatagggcaggaacttgccactaacgtctctccgctagcatagtaagaatgacgaaattttgtaaggttccttccaattttagcaagtaactaggtaactggcgtcagaggcctcaagaataaggccagaaatcggtattgagcctcataaggactctgacataggtgctgtctaacataagcttacgcttctagtctgtgaagtcttgctaatattctcaatttagattcgctcctttgaaatttatccatctatctaccgctccaaattttgtaaagtaacatcaagactcaatgagtagccttcgatatccaacttttaatcactgcagaacagatcctcggcagccctatcacccgtagtaatacaagaccaagagtaatcattgctatcagtcacaacgccagcaccgacattatattgagcacaggtcgtgttgccagcatactggttcagccaatcaacaatatcatcgcccaagttgatgtcttgacccgcgttagacgacaccctgcaagacatagcagcactcggctgagatagggcggacaggtcgaccgacgatgttgtgttgtaattctcccgaggcaggttatcgagaatacgacgcacagcactgccaggatggtcacagacttggatatgaatctgctcctcggagcgggtggcgacactgttgatcgcaagtgttcctgtgtccctgatacctctggtgttgagtgtatcctgaccaaggcggaagcccccgtccacgtcagcagcggagctcaattgaagaatgccggggatcaagtccgtcgtggtgatcaagtctccactgctgaggaccacccacgaagctgactggttggtccgaggcgggccaacaggaattggagggctggcgatgcaagtcgtctggtttccggattggaagtcttgaaggcaatggcacagactggagaaccagatgaagcagccgttgcactcggaattggcgtcgacacagcccgcgtcacattgtgagagctgtgctcgcggtatcacgggtgacggcgggggtggagggttgcaggtgatagggcattgtcccgacggtgtaacgcataccaggtcattgggtgatgctgggaaagtcgaagggcatgtacagcccctcacgtcccttctggcaatgtcatcggacgtacacaggcgtccattctgcgtaccattcgtgggatttatgccattcgtggcattgataaatctctgcccgaagaccggagtcgccaggaagagagaaagggtcaatgcaatgcaatgctcatagatcttcattgtgatagatcagaggtcaattaagagcaaaataattgaactaaatctgcttttccagtacagaggcgacttgttgctgaatatttatagcaagaatcaacagaagccatgatgtaaacctgccgtataggtgtgtcagccctatcaacctcacctttaatgcaatcggctctcgtttccgtggagattccaaggttatcgatcttgacgtccaatgaaaacatgtctcacaagaagtacattggatcatcgccgcatatcattgccgtcgtactgttcagtgttcaaaggtccgggggaaccagagattgactcggattcattaaccgccgtctggtgcttgtttcaagagatttatcaagcaagtcattagttagcatgggtgacctaatgaatcaggccgcaaccctaccccggcgttttgcccccaacattccaaattctggggttcttagaatcggattttgcacaatgaaatccataagcaaacacttagagagcataatgcaggactacacggagacaaacagagaatagagtatacgaaaatccatgatttcatttcaatatcgtcatgaggatataaagaccataaaagctttttcaaaaatcgcgagatttagttaccgagcttctggcgggcgaagttgggcagaacaaagctggcgcggtggatgtcctggttgtagtagcggcagagcttcagctcctcctcagcggtccaggtgcgcaggggctcgcgcacgttgcgggtggcgtccttggagcagaccatgaagccaatctggccggaggggtaggtgggaatggtggtgtaggcgtactcggcgacggggaagacctccttgcaggacttcttaagttcggcgatcatgtcaaggtggagccattggttctcggctgttagatataaagcacagctccgcaaaaccgagcccgtaaagcgggttggttgcggggtggtgcgaaagaaatcagcatgtggtcaatttttttttgtgtgataataagatgaagggaatgagcaatcaaggaaggaattgggcaagaaaataagaaagtgacgaacaaccttgggtagtgatgacacctccgtcgcgaagggcagacttcagtagctcaaagtagggcttctggaagaggctctcagcgggaccctctgggtcggagctgtcagtgatgataacatcgaactcgttctggcggttcttgaggaactcgaagccgtcaccaacgtgggtgtgggcattggggtgctggaagccaatggccatgccgggaaggtacttcttggaaacacggatgacagcctcgtcgatgtcgcacagggtggcctccttgacagaggcgtgcttgacgacctcacggaggacaccgccgtcacctccaccaatgaccaggaccttctcggggttagggtgggagttcatggcgaggtgggtgatcatctcctggtaggagaactcatcgcgctcagtgcactggataacgttgtccaggacgagaacggtaccgtagtcgctgctctcgaagacgaggacatcctggtacttagacttctcgtggtggatgatttggttaaccttgaggctcatggcctggccaggccacatgccggacttctcagagaaccagccatctgtagatgggcgtcagcatgttcttgcagcaaattgactagtaggcggggtaatggaggggcttcacacgtaccctgaatggtggggtgggtgagctcgctcattttgatagagaaagaagagaaacaacggagaaatttagatgatgagtagaaagcagaagagagtctggggagacgaagcattcgaagaaaaagggcacggcggaagttttgctgttttgggcgaattttttgcttcttctcggcttaagtggggaaccgctgctgtgctgccaccaaaacccaatatccgtagaaacaggatgaaacccatcttaatgaagataataggtatgggttgcctctagtaacccttaattgactgcaattcgacccggtacacatgccccatacccataattgggtatggacacctcagggaccaatagagagcccgagaaagacgcttactcaggcttgcctttgaatataagaaaatagagccctttcaagcgcaaaaatatggtaggtaaaaggaaaatcaaacggtcgattgctttctagttactgtacaagcatacagctcccccaaagtgcagagtcttgggtgttcatgctctgttataccaatccaacctcactccacgaaacaaaattgaaataatttactcttcattgtcaccctcgagaagacggccgggcttggagttcaggaactcgttgctaaagcaccaaattagcgcacagtcgaagcggctcctaagggcattcttaccgctcaatggcccagttcatggcgacgtatgcgataatgaaggggggagcaacgtaaagaacctggtggcggaaacgacggaagacgttgaagatagcagcgtgggcggcaccggccatgggacgctgacggttaggggacagcgagtaggtggcgatgcgctggggagtcgggcaacctgtaacatggatattagcgatccgctcgaattgcaatctcctttatttctctgaatatgtctagatcgatccgatcttcatatcgcataaggggtcggcctcctgcgtatgcatccggtccatagaggttcaagggttattgtcgaacgtaccgaactctccccagttgccgatgtagctataagaagtaaaaattgtcagttaactgaatgagagacgcagaatacgcagagactgttaaagcccgacccaattggcatctttaggaatttgaattgtgtagccgggcggccaacgcatccgggaggccggtactcaatccacgacgccaggagcatgggcaaaacgacttactggccgttcttgggatctacggagtgacccattttgaaagattccgagtaaaaagagaggagtgggtggaaaaggtatggaggtagcgaaatgagtgaggaaaagacgaaggtcgggcgaagttggaggtttggaaagatgggcactaaacccaatcgggaacactcagagtgagcgtcgggaaaagcagacatcatctccatcatccgtcttcatcaactcgacttccacctccaaccatggctcaagtcctccaaaatgtttatcggctggctgtccccgtggctatcggtggtatgctagttcaaaattccctttacgatgtcaaaggcggcacacgagctgtcatcttcgatcgagtgtctggtgtgcaagagaaggttgtcaacgaaggaacacatttcttgatcccatggttgcaacgcgcaattgtttacgatgtccgcaccaagcctcgcaacatctctaccacgacaggaagtaaggatttgcagatggttagcttgacgctgcgtgtgttgcaccgcccggaggtgccgaagctgccgcagatctaccaggtgtgtatctcatatgatctctcaacagatacctaagggaaagactgacccagagttatccagtcatacggtaccgattacgatgagcgtgtcctcccgtccatcggaaacgaagtcctcaaggccatcgtggcccagttcgacgccgccgagctgatcacacagcgtgaagctgtttccaaccgtatccgcactgacttgatgaagcgtgctggacaattcaacatcgccctcgaggacgtctccattacacacatgaccttcggaaaggagttcacacgggctgtcgagcagaagcagatcgcccagcaggatgccgagcgggcccgattcattgtcgagcgtgccgagcaggagcgccaggccaacgtcattcgcgctgagggtgaagccctgagtgctgaaattatcagcaaggccgtcgctaaggctggcagcggactgattgagatccgtcgtatcgaggccagcagggagatcgcccagactctgtcctcgaaccccaacgttacttacctgcccggtggagaaggaaaggatggaaacaagagcactagcctcttgctcggtctgcggagttaggaggttataaggctgtttcggggatttatgggccccgttttcacaactcatcgaatgtaccaattaatcgcaatttttgccgcgacttggggccagtcttgcctcgtgccgtgaatttggagtggtctgaactataccaccttcctatctgtagcaataccatacctcactccacaccacttctcttttagaaaaaacattctgaaaactcaatcgtattgctcattaaatggttaaatggtgatttatatcgtgatatagaaaacatcagatctacaaacgtcgatacacgtgcatttggaagcgcatgtcttccaagcctgctccttcgccaacttcataccgcagacgcactgcgtcccgtctccaccacctcgagtcctgagtgtatacgcactcccacttgcccttcgccacagacagcagcgtgtggtcaagcaagaacttcatcggatagttcctctcttgtggttcaccgtccggtccttttcctaacttcaaagttgaatagctgccaggactatcaacaaccaaaagcaccgcaccagcaggaaggatttccgtcattttgagcaaaaaaccggtagtctttggcatggaggtagaaaagagctcattcaaagtgaacatgataggaacgaggacggaagtgaaaggagaagacgaggaagggccgaggagaatttctttgaggtcctcctcgggaagagtcaggacatctccgcggcggaaagacacggagaatgtttcactggccactttctctaagagcaaggggggacgatattttgttgtctgcgaaaatggcacatcggacgaagtgatggttcgtgaaagcctgtcaacaacgtctgcccagtttccgatatcgacagccatgacagagagactgggtgcgctgactccttgatctccttcttctgtcttcttctcatcttgagattccatatctttgttttcaagagacacgctggcaataccttcctctagcgactgggcttgggaccccatgtctctccacgcagctgcaagagcagcgatctctgcaccggctccgccaccaatcgacacaacacgggtgcagggattcttgcttctagcacggcctcgcgtgttttcctcctcctctttcatccaagtcaaaactcccttcaacaggcctgcatatcccagtgaccgggacgcactccagcgcagggcatatgcgcgcagtagatcctcgcctgcctcggtgaaggcagagtcgaaatcgcgctgatatagaagtcccttgattgtctggatgagagatttaatatctaatggttcatctttattttcgtctgattgcgattcagtgaggttggtatcctggcttgcaggttccgattctgcaactgggttgcccaggagggctgttttgaatacgtccaagagcagttgctggagggtaagaggaattgtgctaacaaggttaagtccagaggactgttcttcctcttgttgttcggcttcggctttggctttttcgacttcggctttgcgattggcgtgctgtttgttcgctggtggcgcttgtttttgcttttgcgctttcgcttttggacctggagatctcctgcggtttccctgacgtggggcgtgaggcattattatattcgagaagacactcgtttcgtctagtcctttgtaaagaatatgactgtcttcatcgaacgtggggtggaattttgcactttttttccttatcgttatcggcgactccactataaaggtctataaaccccccgatctgtattcgacttgattgttggacttgttcgaaaattttacccttaaactttggcgaaatatgatggctagatgtatactcgcccttgttgcattacatgagcttgtctccatcaagccttgttgaataatgatcactatggaaatccttctagtccagagtaaaagcgccgagcacgtaagcgtcctaaatacaatcaattggacaaaatatgttgatgataaactacaaaaccctggctgagctcctctcgatcaatttgctacagtgatgatatagaatccctatcatacgacgttgacgctgtatatcgacgcagggttgtcaagacactgcatattctccaaggaaaagccacatgctgacaataaataaactaaaatatacatgactacaaacgtgatcaatatctcaacttggaatttgtgcaccataggaggcttgacagagagagttgtcgccctgccaacatggcccggcgcagctgggcaatactgaattgaaacaccaaacctgacagtttaggggttcaaaacaccccattatgttgcctctcagtaagccttgctgatctgaaaagctatgaagactgactgtgccaactattttcctaaaaataggacactttggtcgctagtacgaaagaaacactcattcccccaggattacgtgtgacatatctgtgtccgagttggtttagctactcatatatagctattacattatacgtcactaagtatatcgaaccgtgcacgtttcatagtcagggtcgggcgtcaagaaggcaataagtaaagatatatgtgcgttgcaccagagaatatatttcgtcggtcattattgccaaccttgcatttcatctccacggagagctcttttgtgataggcaaccaatagaagaaacaagctacacggatacatggcgtgctatatattttgtccttattattaccaaaccaacttctgcctagagcactgcccacatctatgagattccacgagattccaaactctcatccaaagccacatgaagacaggaggagagttttacctgatcaacacgataccaacgtaccaatgccgtccgtcatatgatctcgctcgcgtcgagtcgagagccgaacgcgcgctccacgtaagaatgagtcacagactagtgctgtaagccaaggagtcataactatccgttgcccgagcgtactatcatgcctcatagcctataggccgccgtgggaagcagcgggctccgttgggagcccgtcaacnnnnnnnnnnnnnnnnnnnnnnnnnnnnnnnnnnnnnnnnnnnnnnnnnnnnnnnnnnnnnnnnnnnnnnnnnnnnnnnnnnnnnnnnnnnnnnnnnnnnnnnnnnnnnnnnnnnnnnnnnnnnnnnnnnnnnnnnnnnnnnnnnnnnnnnnnnnnnnnnnnnnnnnnnnnnnnnnnnnnnnnnnnnnnnnnnnnnnnnnnnnnnnnnnnnnnnnnnnnnnnnnnnnnnnnnnnnnnnnnnnnnnnnnnnnnnnnnnnnnnnnnnnnnnnnnnnnnnnnnnnnnnnnnnnnnnnnnnnnnnnnnnnnnnnnnnnnnnnnnnnnnnnnnnnnnnnnnnnnnnnnnnnnnnnnnnnnnnnnnnnnnnnnnnnnnnnnnnnnnnnnnnnnnnnnnnnnnnnnnnnnnnnnnnnnnnnnnnnnnnnnnnnnnnnnnnnnnnnnnnnnnnnnnnnnnnnnnnnnnnnnnnnnnngagcccgtcaacggcggtcttatctcccgactccgacattctagatgtggatgccgccagcggggccgcacggtctcagagacggccgtgctcacgaaggtctcacgagagcttcgtgggtctacgaggcgatgggacacgggttgaaagtggtgtggctgaaatgtctgcctgagaactatcgctatagcgtggaagcctgggtgcctcaggaataaatacttgttcacgcccatgaacatcattggctgccttatacttcggctgtgcatcccgaattcaatgccacgaagatccatcgcgtttcagtgttagcagatggcctcttgaggatacagagtatagataggataatttgaaacatatgaccatatcaagaagatattattcgtacaatttgtcaatcaggaacaaagcgaactaaacgtggagttggttggtagaagcgagtaacgcaaaggatacatcgaaccaaacatccgggtatatgaggcgagataacgctgtaaaccgcctctggagacaacaccgcctggcccatacgaaatcatcaagctaaaacgccgtaaagagggaaggtctccctgaattctcaaatctttgcagaaagcaaagaaagcaacttgtgctcagaggatatccatggagaccgaacccaaatgctacacaaaacaagagggaaagcaaagtaaaaagaaaccaccaaacaaaacgaaaagaaggaaatgtcgcaaattttttgaagcgcatttactgcctcgataaacgcccacaagatgcataggtcaaatccgtagacgtttcaatctgagaaaagcaacccctaaacgggaggggccgcagcagactggggagcgggctgtgaaagatcctggagttcgggcacgggaggagactgctgagggatagcctgctgaatagtggtgacgattcgctccagctcttcaaggcgacgatccttctcttcgatttcccggcgaagtctcttaacttcgttgtgcaaatcgattccggtcacaggcagatcccggagatctccgctgggagaatcgtggcgccgcttcattccagcaataggaagaggtgaggcacccgtggctccctcgacaccttcaagttcaggggggcggtcccaagacatatcgaccatggcaggagcctcgtcattgtgcatgtggcggcggcgaagatgttcgcgcaaattttcttggcgcgtgaatccattaccagtgctgcggttgcaatcagtgtatgggcacatcagggccttcttggtgtcggtgtttttcttgtgaacttcgcgctggtgacgtaggagaccaccagagtaggtgaaaccttggattttgtcacagttaggttcgtaacacttgtagggacgatcatgtttgtccatgtgtttgctacagttctgttagtactgggcgcgttaagaacacaacaatatgacattttacttacttccattcgcatggacgtcggaaagtaggaggcgcagattgacactcaacatgatcgcaaaaaatttgaccttcagcgttcttaggaggatcgcgagcgcgtcgaacagaaaggcgcgggcgcgcgccctcgaggccgtaggtcataggctgctgagggtcgttcattctggcaattgggggtgaggattcaggtttagaggcgaggattgacgcagcgagggcaccgtcaattccttcacttcgtgggctaggatagtcagacccgtcgcccatattttgaagttgataccccacactactgaggggatggtgatagaatgaagtagataccggaaagacgcgtcgtcaatgcacaacaacggtaaatttagaaacacagagtaatggggtcgatggaaacaacaagaatagagttgtttatgaaaaaattcaaataaattggccgtgatagcctagtagatgttgatgggtaaggcttcgggagaagatggaggagttgccaaaattttcaggtagcaaggcatccgcagcctatttataccgcttgcgtcaggtgcatatgcgccacccctgtggcgcagtaatccttattatatcagcaaatttttgcttctttcgtttcctagtggagtttctgggcaactagattgtcatatgaattcataactggctagagtttatatacatgtgggttaagatgtggaaagccgtctattaatgcctggtggtcggatatcgagatgagggggcaaggaagcaagtgactcataccctagagagataccgtgggtatgactgtgtactatgtacggagtacggccaatcctgttgccgtcggcgggcccaatttaggtatcaaagcaagattgcctgtcaggcagctgtccactgtcctctgctcaggtggaacaatatttgatgttgccacagattctgacaaatttagtggcggtgaattcacgtgatacgtagtgattggtccaacccaaatcacgtgcgtatcaaatataaatcgcttatctaagcattggatcgggcagcaccagggcagtgcctttttgcaatgtacgttcgccatgcccgatgttaggctacaacaaactttttatgcttgacaaactttagaattgaatgaactgcacgtccatgtagttgattgttactattaaaaggaatacgataaggtttcatgtagtaggctttgacaacttcaaccaggcgatgcaagctcgcttaagaaggatgtcggacgttctacaggattccaaagtatgtaccctataaacaacgtagttcatatggatatgcattaaggccaagatattgggaatcttgaagcctacaaatgatcctacaaatcgataatactaggaaattttgccacacagtgaatatggcttttataccatcttcatagagaaaatgaatggcaagatgcaatcattccactccaagactatgctacagggcagtatagggacttttgaatagtatgtcatttgtttcatacaacatggagaactaccaaggagatgaattataaaggctagctaacccccacctctatcatattaatagaacagcatttgatactacctgagcctaaatgcacgttggcctacttctgagtaaattgctgcccatttgagcatgttgttcgaccaagcaatggactatactacaacatagcctccagatcttccgaaagatgatgcccaaatcgctaaagtagccaccattcgacgtggaccaacaggcacaggtgtaattgaccacagatacccacatttacgtcaaattttcaatgagttcatcgcggtgtcaaggtgagatgtccctagtgcttccgtagccccaccgggtagttcgaaggtatatccggcgctcattctgaatattttacttgcattttctctcttcagccagttattctagatcctaagatgccatggaattatcaagcaatataaataatcgacacattcttcgatatgtggtttggcacgtgaattgcatctggcattatttcgttgcggcatttgtgctacaggctcgggaaccatgctctgctccaccaacctcacaacttggcgcccttcgaatttttatatccaaagttgcatacgttcattcgtgccaattgtaataagatcctaacacgctagggcacgaataatatgcgccattcatttttactccatcggggtcgaggcctttgctgggcatccagacgcgccttcagtggcgctactcatgcacaagcctgccatacagagaaaaagcagtgctcaaagagcatcgagcgcgagcaaaagttatctcaagccccaaaatgtgccaaaactccgcccttgcaaccccttccgacgctcagtcttccattttggacctgcagatctacctggaaacgagcagggatcaataccctccgctgtttggtgggatgtacaaccggtgatttctcctcgctatggatcctacagacctactaccccgagatgggtatgagcagcgcaatggccttgtcgagtgggttgcctccttgaacggatctaattgtattgggtcttgcgtgctaagaataatcatctagtggcatgcggtatcacgacttcagttatcctcgagacaattctgctccgccggggggctgaccagctttcctggccgatggccgctcgtactgctatgggcatgagtatggtttcaatgttggccatggaactagctgagaatgcagttgactatcatctgaccggtggggtagttgctcttggagatccaaatttctggctggcggcaatgttatcgatcggtgctgggtatttggcgccgttgccgtataactatctgcgtcttcgaaaatatgggaaatcttgtcactaatctccatgtacctatgtagtttgctcacctttacggaacaaatcagtttaatcaactggttcttttgtttatgttgaataccctggctgattgagataatccatttataggcggaggcgttagataactcggaggataagctgacttactgtttttttgtctatttcttacttacgatacggaaagaagggtggaatcataattggcattgtttgtttaagctaatacctgactatctaggatataaagatatcaagtatgacacatggccaaggggtaggggtaaatccacagaattgcacggtaattgctaccgaggttatctgagctgggcatcgacaatcgacgggtgagttttcagtaattccttcaaccggaagatacttgaggatcattgtctgtggcttcatccctgaaagtcacgccttgtaaaattccacggtgacaatggtgagggttcagacccagggaacaatccttcgacggacagaacggtgctctggtagcaggtcaaaaggacccggggataagcatccgaacaatcttggggttgccgatccaaagtcctggtcggcataaaagaaacgggcgagcaaactctactggaaagaaccctgatagtatgcacggacattgcttcgccgagtggtaagacgggcgaacctgttaaaggttgccctgggaaatgttggacacaaaagtcactcagtcatagttgccaccaacttggctagcgaaagcagtagagacgctacgggcatcatcgtcgtcgtgcgtgttttggcccggcacgccgcgagtcactcgaatgctagcggagctgcctccgaagatgctgccgttgtccggaactccagccctgtaaggctcgcgtcctccagactcgacatagcgcttcaaacggtcagattgactgagactgggctgcttgcccatttcattaatgctcaggccagtgagactgacaccgccttgatcaacgctccgtccgtcagtgacgctggatgtgacatcggactcagtggcagcgactgactcgccagccacactgggggctcccttgggtcgcccaccgttcgctcgacgaccgccagagatcgcaggccaggactcgccaaaattctggaacataggggggtagccagatggaaggccaacaccaccaagtgccgagccatgaacagaagatacatcgtcagggatatagcccaccacagaccccgagtcatgatactcgttgcggtgaccaccgttgcgaccattcactgcattatttgggccattatttgtctgactgaaagacatctggaaccgctgcgggcctctgtatgcttgcttgggccggctgaattgaatcaaggactcctgaaggttggaaagcggcccctccacaagacagtggcgttccttgaagtgctgcaaaaggcaattccacaatgggtgcttagacaagaccttggggtttccgaggatgaccaggccaaatcgagcacgagtaagggccacgttgagacgacggggatcgctcaggaaaccaataccttggtgatcattagaacgaacacaagaaaggataatataatccttctctctgccttggaatgcgtcgaccgacgcaacctcgatctccttgtaatgttctttcttgaaggtaccgtttgcctgcatagagctgacgatgtagctccgctgtccctcgtatggagtgatgataccaatatccctaggctgaacacctgccttgaagaagcgagtgacaatcttctcgacgttggtagcttcagtacggttaagatacgaggtgccagacgcggagatttcttcgttgcccaggtttgaccaaaacatcatcggatcatcaatgatgggccaagggaagtcaacgtcacggcggacacgatctgcaatggtgataccgttctgcagcgagccttcatagaacatattggatgggaattcggaaaggcacgggtgcatacgatactggacattcaatcggataggagagcagcccaaaatcacgagacgctcgaacaaagactggttcagaccggccttggcggccttcttgttcatgatcacagggccaagttgctggtgatcacctaccaagaccacttgtttgcagcccagaactagaggaatcatacactcgggctcagcagattgggttgattcgtcaatcaggacagtgcggaacttgccctttgaaagacgaggatcacctgcaccaacacaagtacagcagatcacatctgcgttagtgagaatttcacgctcagcagagcgagtaagttgcttcaggcgcttttcgtcttggctggacaattccccaagttctgccttgagctggttgagttttaccagctcaatgttgctatcgttcatgcgaacctgctcgtgcagcgaaaggaaaccaacggcagattccacatcttcgcgagatttagcagtaactcgtacggtcttgagacccgtccggtgaatacgttcgcagagctgatcaacggcgacgttggatggagcgcagacaagaacttgacctccgttgatcttggcaagatgatagataatagtggccgatgtaacagtcttaccggttccgggaggaccttggatcaaactgagaggtcgttggaggacacttttaactgcgttaatttgactgccattcagatctggtagacctggaacactaaatttctttggaatctgggtcttcataggagctgcagcaacctcatggccaaggagacgatggaaaatgtatcctgagacactctgctcatctacggcaaaggtcttcatagcacattgcatgcggtcgaaggaagtcgacttccagacatagtcggccataaaattgtgcgtgcattcggtgggaactgacttgtggtcgcccttggcgcgaagttcaatagtgacctcatcagattgattgttcggaatcttgatgacatacccgacaccctcccacttaggacgcaattcaccattgtacttgatgcgcatctcgtcacccactgccaatttgacatctcctagctcaagcttaggcagcacaaagcttgctagatgcttgttgttgagaccaagatcccagcgcacgatcaatccatcttgggattgagattccttcaacttgcggtcgtaatcagcctcgatcttaacaagtgggccgaaaatattttggtattggaaagcatcgtcgtagcgaagtaggactggcgcaggctcatcatccactgcggtggccttctctaggtcttccagagtcgcctgagagttgtctttccacatttcctccagtttcgcaatcaattgaggactgaggtgacgagctcggagttgttcttggtcagtaggtgctcctacgagccaggggaggaaagaacgatcctcaataagaggctgccatcgtgaagtgtcccaattcatgtccttggaggatggcatagaggcacatggctgccgacaaagcaggacaacaacagtatcggattttgcggggatgaagccaagcaaaaatacatttttggtgccacagttgtagcattccagaatagtatctcctaaagaagagcccgggtggagttggacttccttatgacgagctcggacaaggtgattgacgatatgggacgaagaagtattgccacgtgcactgcagaaccacttattgcaagcaagacatttgacgacgctgctcgcgttgtggatgccgcagtatctataacataatcagtaaatgcgatccactaagggaatataaacactgacgcgcatgcatgagcagggagctctatttcctcctctccatttccttgggacttctgattcccatttgcgggtacaccgactgtgctttccatgtcgtcatcttcaaaggtttcagagccttcatcttcgtcatcatgtcggcgtggacgtgcgcgcccaagtgcaatctcattaacgtcaactcccgccgaggggtcctccggttggtagctcattatggataccgatttggaacgctgatagggatgactggagctgatcaagattcaaagcaaaaagcgaagcaaaaagcagttgaaatcagaaatgaacttcgcagtcgtaagcgatttaaggagcgtagaggacaatccggtcgtcctatgggggtgttcaaggtttaaaatctccagggtgtgcctgaggggcaaatggatggagatctatatcaagatgtacgattagcgatagattattgagaaggacaggtgagcacatacaaccagtccagctctctgtgtcagaggaccgacaaaagagagtcgatgagtttgtcttgaaggatgagcaaaaagtgttctccaatagcccagattctttatcggtgggatcccactacggcgtcccgtaccaaccataaacgcagccccggagttaagagaaaaaaaaagttgcccgctcttctttgcttaagccacttttactcaatcttcaatatgctggtaagtgaaggatagatttgacatatttgacattatgacttacaatcagtagcgccgccaaactcgcgagcgccgggattatctctatcggagagctttgctactccgtgatgcctcgattgcagaaaaaagatcccaactcaaggcttcattggcttctggaaagcctctagatcctacaattgcaaatgataaatcgcttcgggaagacttcaaatatgacgaatcgaagggaaatgaagacgctgagatggacatcgatgatgaatatgttttaacctccggcattatcgacccccgtcctctggttaccacatctcgctcaccctccgctcgtctcggcgcatttgcgaaagaaattcgccttctccttcctacctccattcgcctcaatcgtggaactctcgttcttggagatctcgtctccagcgcaacctccgcggctctgaccgatatgattctcctccacgaacaccgtggtaccccgactgcactcacgatttcacatcttccccacggcccgactgccagcttttcccttcacaacgttgtccttcgtcaggatattccgaatgccgcccgtggtaccgtgtcagaaagctacccgcacttggtttttgagggattcaagacgaagctgggtgcccgcgttgttcagattctgaaacaccttttccctccgcgcgagaccggaaaggttggcaaccgtgttgttacctttgtgaacaaggacgacaatatcgaagtgcggcaccatgttttcgttaagactgggtaccgggatgtagagttggccgaagttggacctcgcatgacaatgcgccttttcgagatccgcggaggtactctggagaagggctcgagtggcgacatcgaatgggcccttacccaatacacaaggaccagcaaaaagaaggaatacctatgattctttacgaactcgcatcaggctgtggtgtggatggttcaggcaaaattcaatcccatcattgttggtcgactggcgtatatggcgttagagggcacttagaatgggttcttttgtaagttagttatgatttaaatggcagtggagaatgtctaatcaaaatattaaagacatgtacagcagctttttgagaccgtggttgccgctctgtactttacgagactatgtgtatattattctagcatactggtccctccttggagctggagtgaccattgactttctagggctaaatatgcagcgtgacccgcatcccccacttttacttctatcaccttgatgttgtaggacgaagcctgtgttcgtttgccttacttacgatataatttcatctttagcggacagctagcagcttatatattgcccgtagatctaaattgatcaactccagcatgccaacacggaagggcttatcaagtttgatgagattcgcgaattaggcctcatcgctgtcctcctactcaatgggaaacagtgaccaaggatgcgacaggttgggaaaggattgtttccgatgaatccgttggccatttttcatattcattttaagttgtaccggtactttgagaatatctgccatcagttcacccagcacagtaatctcacaagtactatcgaactttctatatgatcttggaatatcactcattttgaacagccccatctcatgtttcataaaaggagacggcacttgtctaagcgtgacaccatccatatgtagtatgattggtttcataattatcatgggaagcatttctgaaagcacgagaatagagggcatgtgtattacgtgttgttctaaaatcatcgaaattgcattcggcataaaacctgctcttggcgtgacctgtccatgtgcatcggggaattcactcatgagtgcaggtgttaaccacctggagggattgccatcatccttaagtactacccatcgatttcctccttcgcctcatcatcatcatcatcatcaacttcacatccgtcttcaccaccatccttgacttgatgatttgccatcttttcctcgatactatcctccttgataccgtcgcatgcgatgtcgcttgatccttggcaggctgtgctctggggttccttgagaaatgcactaaggatagtcgtcttttcctcgagatagaaccaaccctcgtgaacaggcaacgtgcttccgtccatgtcgatatttgggggtggcatctttccatttgccctctcgtcccattccttgccagtctgttctttgaaaaattgcttgaatttgtccacggcaatctcaagcttaccccttggccccgcaagaagttcaacattggatatgccaacgcgactgaatttggcgtaggtcgagtaggtgtgtggttcggcagtagattcgaaaagctaggtaatctcaatacctttttcttggacgtattcacagaacatctcaaattacttacagtcaattggtatttttccctgctagtgactggtggttttgatgggcggaataaggtgatgctgtaaaccacacttgtctttctgtcctggtaaacctgacgcacggctgtgatgggtaaatattagacctgtatatgtcatctgagaatcgtgcttacgctttcttttgccctttgggtcgatgaaaggatcggctgtagatgacatatcagtaccgtccgcattatagcaataaatgaagcttcggaaaaccagtacctatccgacgtttcggaatctttgttttgatctccctcaccacctttggggatttagacttcggtgtgaccttgtttttctggggttccttattctcgggcttcatcagattcttcagaagatatggtccctcaggctttggccggcgtgtgtctgatagcaacgagtcttcaagccaatcatatgagacgattttgacggtaccgatattctgagcagtctccactgtatgttgttgattaacttaaggtctttgaacgatttaagtgtaatatacctggaactgcatggctcttgaatgcctcctttgttgcaatgagatgagtgactcgcgggttcacgtctctcgagaactgccctccatttgcccgaatccactgtgggatcttttcgccgatgccgtcttggaacttgccgactatagaggcatgaatcctttggaacgtcttccccattttgagttcacactgctgtctgagaattgactggatgagtctggtgtttccgtatcactggcagcggaatttccacttagaatggcctcaatatgagatatgtgatgctgtcaggaggggagactggaacaccgcaaggaccagttttataggcaagaggcttgcttcagttggtctttgctagctgtagcaatatgtcagaaatgaagtgtgtatattgctggaaagcaagtctttgagagataatgactgagagggctagtttgatgatgcccagcctcgtttgagctctgatgttgaccgcgatgtcgttcagaaagtgcgagaagaacctcagaaatgagatatttctattaccaggggacaagacttcgaggcaataatgtgatatactgcacagagctgtcaacttggtctgcttttgcaatgttgatatggaatgcactaagcatgatgatttctagagggtgaaagtgatgagaaagtataaaatgggatttcgaaggcaattaaagacgcagatctactccaagaaaggatcaaaattcattcctgttggatatccactatagccttgatcaaacaagtcaaattaaagtgatactagaaagaaagaaatcataagtttgattgctatggatattgttcattatcggatatgcaaccccggaatggaatgagataagaagtcattctaagtaatgtcatacacgttcctaactagttcattgccgaatgcttttggcagacttgacaaatgctcgaattttctccaaatcttgagcgccgtttgtctctacgcctgagctgacatccaatccgaccactttgtggcccgactggcccagctttttcaccgtgtcgaccacgttgtccgggtttagccctccagccaggattaccctcaatccatcgtcactatcgaggacctttttgaccccgccctcctcgagaagctcgccagagcctccggcaccagagtccagtaatggaagagtgtggtatgctctgcgagcaatgccaatgtcaccaggagcgaacttgcgaatgacaggaactggaatcaaactagaccattccaatggctcagacccatgcagttgcacaacatcgagatccaacttttgttgttgagaaatgacatatgacaacggctgattcatgaacacgcccacgagcaaagcacgagaagggtgacgcaagatattagtagagtgatcaaaccattccaacggtgtagcgttcgacgactgctgcaatgtattggccgaacgaggggtcgacttaaccacccgggaaatgccgagggccacatcatccgagacaagtcgtgagcgcccctgaaccatgataatgccaatcaaatctgcaccagcttggatagcagccagagctccttcttcagtccgagttccacatattttcaccaacggggaacttggtgtagcaccagcagattttcgattggagccgccgagaagctgtgccacaaaggcggaggtatcaggtgccctcataagagcctctccaacaagaatggccttaacaccttctttcttataagcctccacaacctggggccccgagattccactaagggcacacacaattgtgctctcaggcacttgatccattaggcgactggtagttccgagatcgacctcgaagcttgtcaggtcccggttgttgacaccgatgacttcagaccccaggtcaactgcaatcttcatctcttcgggggtgttgacttcgaccaggggctccatgccgagactgcgtgagtaatggtacagtctagtcaacagctcaatgtccagcatcttcacaatgagtagaactgtatcagctccagccaaacgcgcctccaggatttgatactcgtcaaaaacgaactcctttcggaggacagctggtcggttggtgagtccctccaggctctggcgaacagcccgcaggtcatctatggtgcccttgaaccactccggctctgtgaggacagaaatgacgctagcgccagctttggcgtactcccgcgcttgagcaggggcacatacatcagccgagatgatgccctttgagggtgatgcacgcttgatctctgccataagtgaaagaggatagtctgactgtctcaggcgctcagggaatgacagctgaggaggcgcaatgttcagatcatacgcggcttgaagagcctctggccgcagagccggaattttcttctgctcgtcaacagcaattttgcgatgagagtaaatcttatccaaaatggatagcttcttgtctactggtgcggcggcggctgctccctgcttgttatcccaggtcccagtggtgagctctaagaagtttcggaacatcttgcgcccgtattccgtcaaaatactctcagggtggaactgaacaccttccactgcgaactccttgtgcctaatacccataatgatgttcttgccactaccgtcccccagctcaactcgcgaggtcacctccaagcaatctgggatagtcgactgtgttccggcaagcgaatggtatcgagtgacctggagcgaggttggcaatccctggtagacacctttagagtcatgtttcaactccgatgtttttccgtgcagaatttcgccggtcacatccaccttaccaccaaacgaggtgatcatacattgttggcccatgcacacaccaaatatcggaatctttccgctgaaatattggattgcggcgttactaattcctgcatcggtctcggggtggcccgggccaggactgataaccagctgagtaggcttctttgcagccaagtcctcaacagtgacttcgtcattgcggtatactgtgacggtagcaccttcaagaaccaggtactggtagacattccaggtaaatgagtcgtagttgtcaatcaaaatcacgttggatgcgctggccaatttggccgctttggtggcatggtggggggagtggtcaaccaggtccgccatgaccacggattgttgtaggagatccgggggaaaggattgggagaatttgggaatcggtattctgcaagctccggatctcagacacctaaaaccgaatcaaatgtttgcgaattatccagttggacggaagtgagtcaaaaagaatgtcccggcttacttgccactcaccgcccggcaataagatcagatagggcacctgattgttgacccagtcgcggtgaataatattcttttgaagctccgtctcaattcaagagcttcccacgctcgccacctacctttttctttgctctctcgtcacctttcctggtgtcgcctcgtttcgctcttcctttctaccctatgatgatctaattgcccaacatggctcccgtcccggaggcctatttcccgtccctggacaagtgcttctccggggacgttcaactcttgtatgtccactctcatcatttgtcgttatagaggctaatatgctgatacaatgtaggtcatggaaaagagcttttctctacgccattgatcccgaaagtcatgctaatgatggaggcaatatcgatgtcttcttctcacactccgaatccattcgcctactctctgatggcctaaaaccgcccccctccccctccgcaaaatccaagtcggaattcgaatccaaaaccgcagcaatccatgttgagaccaatggccaaagttctttcgacctgaaggagatcaaggcggacacgctatggttaagcaagcaagccggaatcgacgagatttctgctcttcgcatcgctatcttagaatggcagaaccgcccggcagcgcgtctcaccatcggtttttccagcgaggaagcgaccagtctacagagtgcggctgggaccgagaatcttcgaggctctctagccggtcccagcttcgccaacctattgaaccaaacagccagaagcgacggtggtcaatcatttgaaaaagaggagaagaggcgcttgcgactccgcgaggtgtatctctccgaggaaacccatgtcgtaaaaacactccgcaagctgcttgctctgtccctacacgatggtatctcagccgactcgaccgccagtcatgatcgcaaacttgctttgcagaaggtagggaccacaattttccaggacaagtcgactggtgatggattggaccggtttcttcaagaatgcatcagctcgatacgccgtcggttaacgagtttggaaggagacggtggctggctcggtgccacagaaagcagtgaggaactagagaacatatggagaacaagtctcgtggaggagattgttcatatcgtgcaaatcatgtttcaccagcttcaagcatcggtggaatttccaagtgcagacctcctattgtcctggctccagctcatggctgattatagcttcctggagacaattcaagcggtaagccgccagtcgcctattttgagctctcggaatgttaacgttttcttatagccttgtcagcaacccgtggaagtgttgttgccccttcaagctttcgtgtcacttaccacattggcgtttttaaaacccgctcgcgccatctctttccttcagaatgaggaatacatgcaatcctcgctccagccttacttctgctgtaaggataaaatctctcaaatcaatgagattttccttactgcatgcggtgatttgaacaccgtgaatccggcagccttttcatggggcctgatcttgtataccatccaagagctggcagaagacagaagaaccagccgagagcgtcaattgagccatgctttggctgccgcctacgacgagcagacacagaatgaagcactagctcaagcatctgtgtcttcagattatgaacaattgcttgactgcgctaggactccgcaaagcacggcggaagatgctattcccattcttacatctgatttcctgaaagaatcggcattcaacaccgttatcgccctggctagtaagaccgggtcaatgtcagccgtcgatgatggcctgacaacccgatggattcggttatcacttctcgaccttatccgagtcgctattatgttcttggattactctcccgaaattgtggggtcagtcctggctatcttaaatgatgatgacaacgggctgtcaagagactcaaattccctaggtcctgccagcgatcctaagtctgtattcgccaaggatcagaatttgatggatggcatctttcgcattgcacggtcccgtttcccttatgaaacgtcaccatttttactgctctgtcgtgctctcgtcagtgggcactctttgaatgaagaaggtttgccggctattcttgaggaggtggaaactatggaatcctttacacagattgtcccacccactttccagggctatgccaccattcgagaagacgagaacgccgattttgtttccctgctccaacccctcccaatgttagaaacatcgatccagaaccgtgctttcgagagggaaccaagcaatgctgtaatcgtcagcggttcttccgaaattccacggctgaccgttggtcaagtcatttccgattcaaaacccgcggttatcatgtgggagcatcgatactcctgcttaagctttctaggaagctggcttgaagaatggagcgagaccggtgggcactcgtctgagtggactgatgacactgctgcggaaattattgctctcttggccgacttgatagccaactctaaatcacaaagctctggcgatgcaagcggcaaaagaattctagagatggctagtgatgggctgtccaaacagggtgacatcatttctgtgatcttcgatatctttgaacgcaatttgcagactatcggctcccgaggagacttgggcaagtctttggacgtaaccatggcatgtctgcgctttatcaaggcacttataaagattttacccagtcgagtatggcctttccttggtcgcagcagtctcatcgggtccgatggcaagggaggcatcatgacagcaatcgtttcagcaatggaagttccttccggcgagtatccgttcctcctcagttgtgttgaccttgtgggcgctgtcatcgatgatgcggcatctcgagcagtattgcgaaagagcccgggcagcgtgacaagcaaaccatctatcgcatctgattggagtgctggtattccatctcacgtcatgagaactattatgttgaactttattcgcacaatgctggagattttcaacagctgtggaaattggaggttcaacctaccagaacaacggctcaagatcaactcgatgcttgctacttcgttcgagcgtgttctgtactatgccttcggaatcaatgacagcccgaaactagagaccaaagtgaccggcgttttctctacatctgcggcgtacattctagatatgctgcgccctcggtcaaccgccgacctgcccttcaacccaattcttcggttgatcgccgagggtcttcagactcccccaacacttcatctcagatatcttatcctctttgaagatcaggtcaactctacactgcggctctgcatcaaacttgtacaggcagcccaactggcagaacaacctgcctcgcttctagaggaacaactattcaaagccagcccggtcttagtcaaactctacgcgctacatgatgcatacagattgccggttgtgtcgcttctcgagattttgatctcaagcgccgcttcaaatccggataatgaaccaccttcccttgttggccaccttggggcagagtcgtcctgtctgttccttgatgtactgtcacaactcgacaagccgatgtgtgacagacctctatttcttgcagtatggcagctgctatcgacatttgttagcaagcgtcagcagtggcttgcagttttcattctcacagggtcatcccctcggcagactctgaagaaggaacccacttctagtgggcttagcatgaggagcgtgcctttcctgaaactggcgcttgagaaattgtctcatattgatcaacaagagccgcaagtagccttagcgttgctcgagtttgtctctcgtgcccaagaaaattggccatgggccacttcccacctgagcaagcacccccagttcttcaacagcataattaaccacgtctcaaaattgaagatctcttctctgccagtgatggaccaaatctatgccacgcggattgcagctgttgtcgcggacctgtgcgcggtctatctgcactcggcaaaggaaatgggagaccgaagctttataaagaccttgattccattagtttcgtggtatgccaaggatgcagttgaagtttcggcttacaattcttcattgcacgccaacttgaaaaagaactttgagatgcgatacgcgggctgcaaaattgtggacttcaaaaggacaccgctcgaagttcgtcatctgggacgggattactactacgacatgagtatgggagacaaactgctgtcctacgactttgcctgggctggcaccaagaaccgtgggtttgccgaggagtttgagcgtgccaacatcaatctgtctcttgtcgaggcgcaggtggtaggttttcttcccttcgttgcatatgagtttctttactaacctcaaaaagagccttctccatagctggaagttcttcgctatcgagcattgtgccgatttcatgcccgataccgaagtccgaaagtctatggcactggtcgcgcaaagttgtttgaaggccaatattagcagtggccctcccgaggccatctttgagcgaatccaacaagcacgcgttgactttgcccaggcacttctccagcggcttgtcgaggtacatgctagaggcgccgaagtcttccagctgctcgagattacctggaacgcactgcgatcccgccatctgacatatgaagacgctttgatcaatgatgataccgattacttccggtccctactgaacgtgttgttcctttcccttcagtttcaccttgatggcccctcccggagtgcccccgaagctatcaataagagggctgaggtttcttcgggtctgactgtcatcgtggaagtcgtgaaaacaatagtggcccagggcttcaaatccctcactacttatctccatgatgcgcccgagaaatgcacgccaaaagatttcgccattatcaatgctattctacagacatgcttgcaagtgaagaacgctgatcgtctctatgagcacatcgtgtaccacattgaggaatacgacaccgctcgtcatgcgacgacgctcttctcctgggccgaccaattggccgttgccggcgaccctgtgtacgccgagctcagcatctcgattctggtcaaaatgtcaaccctgcccatgctcgcagagcaccttgctgttgatgctgtcttgatgaaactgtccacctgccgtcttacaaacattctctgccaaaagaaagcattcggaccctttgatcctgttccccgactgtatgccatctggactggtggcttccttcctctgtgtctgaatatgctctacagtgtgatgcgggccgcgccggaggtggcagcattcctgaaccagtttgaatctcgcctgacccgcgcgacagaggcattctccagccatacggccgtttcctcggttccgacatccaagtggattagcctcaacatggtctcggaagcctactcgcttgcgctgatttcgttcatcctggaccggttccgcgaggcgggtgccagtgctggagttgacgcacaggccatccaagatctcaaatgggatagggtgcaggtcaaggaagatattgaggaactgctcggtcgccgcgctgctctgcgtgcacgcattgtcgcgaccaatgaaaaggagctggaatggtcccgacagaagcctgtcgacccgacttctgagtcacagaaccgattagaggagaagcttgttagtgagctgaaggcaacagtgacgtgtttgagtggggaggattcatgaatatgttctttgtagcctttctgctatttgtctcttctttttttccatgtattctgggttggcggggtgtagtaaatgaattatttcttgcatgaagctcaagtttcaaacaattgcattatcccaatccttcattcctttggattctatttttggagtggactatcacatgcaggacaggacgcctaatttggggaaaccaagttggcttgatcctaattggtctcttgcttgcagatcttggcagatgagctaacggggtcacatccctcctccccggttctcatgcacatgatattacccgaaggtatagccgactcgattcggccaagctgcttagcggtaacatcaatagggttgggtttgaatttggaggatagccgtggagaaggggaatattatcggcggtgcttgatttggcgaaccgatctatataggcctaaaagcatacgttagcttcgtgtgtggagacctagcagtcttgtagagtggatgtttttcggttgatgaatgcaagaatagccagcctcatgtggctgagagcggcatgatccagtttgcccaatgggagtctttctttggtagtcctttgcgttctattctttctaaatatccttgggtagatggcggaaagggcggcgtataacctttgatagccagcaactggcattttcaatagtgcaggctatattggtgtaggatgtttccatgtacttttctacactcgttccttccacttttgctgctgtggcgacagtaagttacaactcaactatggaggtaggtgtgaaggggtatagttggttaactagcggccagagtcaaatacctgacttttgccttatgttaatgggatttagaaagaaccgcatggtttctattcactatgagcttagtacactagtcccatgactgatctattactcggtacagcgtgaaaaccgaggctcgggctagtcaggttccccgcaaatcctatatgtatagcataaccgataatgcggggagattaactgcgaatcatgcaggatttaacgttctactccttatttataagaccccctcgccgttatctttctccccatatatcgatagcattagcattaccaaaatgccgtataaatcccgctggacgattgacatcccagacatccatttagcctctcttctccttaaatccccaacggcgcctctttccaagacacacaagtgctatctcgaagctgcccgtccagaaacccactatctcgccacctatgatctccgtctctggagccagcggttcgccgccggactacgcaaatcaggacaccaacgaggagaccgcatcctcctcttctccggcaacgacctcttcttccccgtagtcttcctaggcgtgataatggccggaggaatcttcaccggcgcgaatccaagctacgtagcccgcgaactagcctaccaactccacgacagcggcgccacgtacctaatctgtgctagcagcagtctggaaacaggcatagaagctgccaaacaagccaatctcccccaaagccgcatcttcgcctatgacagctccatatacaacggtgtaacaaacccgcaaaagggctgcgcatactggagcgacctcctcgcctcggaagaagaaggccgcgctttcatatgggacgaacttaacacaccagctctgtcgtcccgcacactggcactcaactactctagcggcacaaccggccgccccaagggcgtcgagatctcgcacaagaactacgtcgccaatatgctccagtactgtcacacggcaagcctgcgtccggactaccaggcccgtcttgcgcgttcccgctggctatgcttcctgccgatgtaccacgcgatggcgcagaatatcttcatcgcggcggcgctgtaccgtgccacgccggtgtatatcatgtccaagtttgactttgtcaagatgttagagtatacgcagaaattcgggattacggatcttatcctcgtgccgccggttgttgttatgttagcgaaacatccggctgttaaagggtttgatttgagtagtgttgagttggttggaagtggtgctgcgccgttggggagggaggtttgtgaggaagttgagaggttgtggcctcccgggaagattaatattaaacaaggatggggaatgactgagtgagtttgttgttttgctagccgattcttagaaactaaactgatctgcttctgtatagggcgacttgctcggttacgggttggaacccttgcgagattagtacatcttcgtttgtcggtgagctcaatgccaattgtgaggcgaaaatcatgtcgcttgatggagccgaggtgaaagagcgaaactcgcgtggcgagttgtgggttcgcgctcccaatgtcatgaaaggctactggcgcaacgagaaggccactaaagagacgaagactgcggatggttggctccggacgggcgatattgcctttgtggatgacgatggcaaaattcatgttgtggatcgaatgaaggtgaggttttttgttttacaagaagaaagaagaaaaaaactaatacgaacaggaattaatcaaagtcaaaggcaaccaggtggcgcccgccgaattagaggctcttctacttgaacatccggcgatatcagacgtcgcggtgatcggtgttatcgtgtaagtctgactttttttatgggtctttttttttcttcgcttctgatcctgtttagcgagagcgatgagcgccctcgcgcatatgtggttcttaaaccgggccaatccgccacttcgaacgacatcgcgcatttcctggataacaaggtttccccgtttaagcggattaccggcggaatcgtatttctcgatgcgatacctaagaatccatcaggcaagattcttcgcatgaaactccgcgagcaggccaaggaggagctaaagagagtcgctgcgagactctagactttgtttatattacaatttatatatcctagcggtttaccttttttccagggatgaatccaatgagtaggtataagagatgcctcggcacaatatatagagtatgtgcaccattctaatttcgtgtgtccttcggtgattggcagggtacaacagccgagccagtcaggccaacccctatatggacagtgcacactgtcagaagatggggccaaagggtgagggaaagtagatgaatgattgttcgcatgggttcgcgtagcccactaaaatagccgagtagggcatctcgcggtgtgattcgatgtatgaaatggcttagcgcgggggacccatgcaggcgccagctgaaagccaaagacaaaggcgatctccaagaggcgtatggcggagtactccgtacatccaactccgtacatttgtcatgatcgacatgtttctctccgcgggcattaataggtcaaatatccaaggtttcagggtcctaagaagaagataggcatattccttcgtcgtgaacagaaaaaaatgttaaaccggtggcgttaagaaggtaagctgagtggagacagggctggctgggccttatttatccacattttggggtatacttgtcagtcacgatgttgtacggcaaagagatcctgttcgttctgtgttgcaatttggattttgactttgcgacctgtcgactaattctgatttgccacgttaaaaatatcggcactcggtctcggttttcttccgtcagatgtatggcagagaaaccctatcttgcagatactatatcccggtatgcttcagtggtgatcaccttcgatcattcccccactatagtctaaattgggtctacaactccataatactcaaactctagctctttatatatcacctaaaaagcccacccctgcactccatcccactagttccttcccactcgcctccccgccaactccgcgcatagtctcgactcgacactggtatctttgactcgctaaaatcttccaaactctggccatctagatttactttcccacacgggcagttaagttgagctgtttccccattccacaggggaggcagtttcaacatattcttcgcgagtggtggacgctatccaaccacccaacaccccgtcatgaatgctgtggaacaaggatacaactacctatcttgtgacctcctacattcgaccacaaagtggtttctaccagtgaccagcctggtcagcttttcacttctcactctcatcctcctccaccgatatatcaaatatcgtcgtatgagacaagcacacataatctctacctctggattcaaagaaaagaatcaagacgtctggcttcaatctactgccatggaaaaaggaaacatcctctcaccgggctcgcacccatcggcatgcgatatcctgcaacctttatcccgtacaagcctcctgccaagcagtggagccctcgctgcacgggcccgagagcagcaaagtggaagtgctgcatcttcgatggcttcctcgcctgactgcgaggtgcaaaaacacattgaatcaactcagcaaatgtgcgacgaggatgccgggggtgtgcgcacttggaaacgtcttgtcgttgagtatcgatagttggccgcctgtttccggggtttattcattccgtacatttgtcggacttgagcggtcttcttttcgattgtatctcagccggggattccgtgggactgttatctttttttttttcttgctcttttgttatgccttctttcttggtttcccctccctatcgttgtctttactattttacgaataatgagaagcgtgggcttggtttgttttgggcggcaaatgggttcattttgttaagcatgtttagcaatacatatacatttgaatatgccacgtattgtggttatgatacattagaagaaggttgaaatctgataattagccgcccttgtagctcgaggaacatcttcagaatgcttggcttgattgtataattgaattgtacatgatcaactagttatcaatcatcgccttgttcgatgtgatcggtcgcggatctggaatgtatcagcgacaagagattcagatatggattgcgttgtaagacatactatatgagggttttcaagagcagattgatcgcatcaagatgcgattcgagcttctgtcggtatcggctcaaggactcacatctgagatgccacatgatgcgtcgccattgtgttttgacttgaacaatcaatcgtcgagagtgcaagaaattgaatccatttccatcaggtgatcctaccgaaggcgtggtcactgttgctcggtacttttctgtggcgctttcgagatgttctaaggtttggaggcacgatcgtaccattaaccctaattgttgagatagatcggtggcgccagggtccgcagtattagagtttctggacaagatatccatagcagctctttgcaactgactcagggagcaattcaaggcgaacagaacatccccaagttcttgtagatcgcgtggtgcattctcttgacctgaggttgcggctgtaagtaaccggcaggtaatttggctgcagagtacaatatctccaattgagaaaccgaacgacattccgccgtcgaatgtgggaaaagaaacaagaaaatgacaaatgagtggaattgagaacagtaatagggatcgaaaaagggttggtgtagtataggtaattcaagtatcagatagggtcctctgggcctcgttaatgcgtagccctatgtcgtagatattccgcattcctgcagatgacaaagtttcagagacaggggctggactgagccagtgcatgtgtctgccccatactgtgtaccaatcaggatcatagagatctgtgcagatgcctatatatatctcctctgattagcacctcttatgtcaacgaatgaaagcgaggggattcaatttgtccatatagaactttgtttagctgtagccaactagtctttttgtatctaaagcggtataaataatgtagttgaacccaagccgatccacaattctgatccggatgatcccgagtcatcttgaaagcgtccaagtcccccgcatatatgtgtagtaaaacgtccccatgacctgtaaggcacgtacctatgaaggtatttagctctgagactctggtggtacctggtggttattcgtcattcattgggcacgcacggctgggcatctattccaaagggttcagctacacggtcaagtcattacctcccaaaatctcccatacaatccgtctctctcgctcttcacagctctgctttctactaaattgcctgctcttgctctgtatgatggctatcccgatcgagattaagaaatccgcgacagccgacgaacttatcgagttcggcaagacccaggcataggtcgtttcgcccgtgtcccttcaatcactaaattagcacagctgaagcatgatgggtgcactatcttgagtgaacgaaggaatatgatcaacactatcgatgcgccggacaatgccatggctatcatagtcgatatcagcgcgccaggcggcaaattcgttattggaaggcacgcaccgacgccgtggggcaacgacgtagtcgcggaaagagccacagagggcaagacgcacttggtaatctggccatggcagccggaatggcaattctatgcaatcggttcgaccaaaataagataccttgtaaagccctccaatgctacataacctagcataaaaggcccccgtcagcaagagaggtcctgtcagctgagattttgggtgatgagcccagtgaaagctctacaagatctgtcaatcgatcacttcatcgtcgcgtgatctaactcggccgtttgatattgcgaatagaacatgaaggaggcatatagtggagatattcggaggcgaccagtgcctcagacttgttagatgaatcgcttgtagctgtcaccacagaggcaatttcaccaaattgctagaatcgtcatcatctattggtctttaagtggggtgagccctcaaatcgaactgtgacgtttccttgacgcatgccgtcctgtgagaagcgaatggtagcgagcataaaatatatcaaattccaggtatccaaacagaggtcaaaatgtaggacctgccatagatggaagattcaagattcaaatctcagctgacacagccacgcagccacacaaggatcatccaatccttcaggcttctctcctctttcacgcatatgaacactcatcattatatgatcttccacaatgtacttcatccgtctcgctccaccgaccgcaagaaatcctttgattcgagccatatcgtcactcgcgcctgggagtattcttcaaggcacctattggaactaccgcattctcaaccacaaccacgttaagggggatagcacacatatctctgatgtcttcaaagccgaggtcattccacatgagaattatcataacacccccaaggctcccaaatggttcatttatcatataaagatataataactagacttaaaggctaacttggctgcatagggcttttgtcaaaggggctttacctgacaatgcaactgccatactgaatctggaacgcgaacgtcatgcttatcatcttcctggtgtctcttccagtcagtacttccggaagatgtacgacgtgatcgacgatagcactatcgccttagaatggctggataccactcttgcagagttgaaataccagcctaatgatatgggcactcattcacttgttgttgctgttctaagagcagcactgactagttgtgccgttctggaggactccaaatatgtgaatacaggtaaagtccctattcttgaccttggaacgttggaatagttagcatatactaactaccctagactataagcctgctaatattctgctttctggcatcggttctgactgtatcatcgccaaagtgggagacttggggctcagtaagcaaatactaatagacgaattacgatttcgctaatatcacacacttatagtggttccggttggccacctacgccacgcccagccatatgccatgcgagcccctgaagtctaccttggccaagcatgtgcagagccatcgcaggtcagggcagttgctgcgatgtttctttgctggatcaaaccgggtgtgttaggcatgtggggtagctatcatcctttcctgaacgaggcttggtctatagtaaagattaagcgactctttcccgagtgggacattccgacacctgatgaggtcgatgggcacttaattaaaacagtagtaaattgtgcccagtctatgactgaaaccgagccaaaactacaagaattcttaccttttgacgaggagacaaaaacgttggagatatcggaccagctgagagatcttcttcgtttcatgttggtacccgatccggttaaaatgccctccgcttcatctgtgctggcatcgagggagttgcaagcttttgagaatcttggcgcataatctaaccatgtggacttgtttggatagattacacccatagatgtatatactgtagtcaaattcaacccgatccacttgttaagttgttccccacctcgggagctgcgccaatgctgagtcatcacgaaagcgcgccagctctacggagtacatcgatgccacatcttcaacctacaacaacttacttttgtaattccaagccacagccatgaccgtaacgacattcccctctgagggatctccagatctcgcccttctcaatgttgctcgcctcttcaccagactcgagcataatctcctctctccggggacagaccggcgggcattccaacaatcagaatatcagcgtatgcgcgtgaacaaggtaataaataactccatccttctagaactttgcctccaaagcttcactttcaagagacaagtataaatctaaccaatgccacagaacgtcgaatacgcccgcttactcctcacccaactcgagcgctccctcccacaaatcaaacccctcgaccgcaaacacgaagcacaagccgagatcgcgcgcgacagacagcgcctgaaacgcatacagaccgtcctcgaggaagaagcagccaaagccgaagcgaagcaaggtgaagaagacgagactgacgacatcgacgacgaatggaaggagctattctccaagcccgtcaccgagaagaaaactgtctcgcgtaaagatcagcagataccgacaaggccatcagattcgcaacgagaagtgaacggagcgagccaaaccacgattacctcttccgcaacagcgactccagcaacaacaactccaacacccacaccctcatcaacaagcccaccagcacaagcatcagcaccagcacccccgaccctccgcaaccgctacacaactcaccccgcaccgccatcattcgaaaaagcagctacgactggaagggatacaaccaagctctctggaacagaatccgaactgagcacccacagactggaacaggaagatctgacaagctctctcctcgcgcttgcttcgcagctgaaagcctcctcgcataacttccaggcgacgctggaaggcgagaagtcggcgttggaccgcgcggtgtcgggcatcgaccgcacgagtaccacgatggaagcggcgggtaagaggatggggatgttgcgcaagatgacggagggcaaagggctgtgggggaggatgatgctgtatgcgtggattttcgggctatgggttgttgctattctgcttgtttatgttgggccgaagttgaggttttgaaactggcataattcagcgctgtcttcgtctctgtctatgacagtttgattctatctttatgcggataccctttttttttgctctgcatatatatctctgcaaataacactattgtcgatatctacttgggagactgatataacacgcatcgaggtatagaaatagtatggaattaagagtcagaaccttaagagtcaatccttgaactctgaaataacccaacgaccgactggcatgacacatgagaaggaaacattcaaatccgcggatcctggcatttccccgtgcccaatgcccggatggacgctcttggcttccaacggacgcgagaccaaggaaaatgatggggggagacgatatggttacatacataaacaagaactaggggagagatgatatgatatccagcattcaaatcagaaggatcacaaaaaaaaggtggaaaggaaataggaaagagaaaaagaagggaggggaatacttcttgttttctgtagtggatatcaggacaagagaaaacacaaaaaccggctagaggctgtgtagatggcagggaaaattagaacgtgagcaaatggagattaggaaaaggaaacgcaaaagagaatcaacgccgggatctcgaaacggggattttcgaccggttctgatcagccccggttaataaaaacatgcgatctaggttcgacatacttcaccaaacgatagttcattagatcaaaccgcatagacggagattctcttggatgatgatatctgtgaaacgttagacaagtgttgcgcactaggttgggatggctgagcttaccgttcactgctgccatgacgaatcgaatctgggtagtgtcagttgcgcaggtgaagtgcgtgtagatctgcttttgctcggcctggttcagggagacgaaacggttgaggatatagtcgcaagccgcggcgtagtcggcaccaccctcgtaatcagggaagtagttcttcatcgggctaacggggagcttttccttgaaacgatcgatcttgttgaggaacagaatgatcgaggtcttgacgaaccaccgggaattgcagatcgagtcgaacaaggtcagggcttcttgcatacggttgacggtctcgtcttcgaagagcagctggtcgtactcggagatggcgacgaggaacagaatggtggtgacgttctcgaagcagtgaatccacttcttgcgctcggatcgctgaccaccaacgtcgaacatgcggtatgtaaggtcaccgataatgaaagtggtctcggtgataccggtggtcttgacacgggaacggaggacatcctggtcggtggggaggtaatcgggctgggcaatgcgctcaatggaatcgaagtagctaaaggaaacgaattagccacgtcgcaatgcgacagacgagcggtcactactcactatttggcagagtcgttcagctggtattcgcgcgagcgcttgaagcactcctgaacaccagtgtcgcgccaaagttgtccaatggcgtttccaacctcggggggaatgctgtcaccctctatctgagcgggctgcatgaagatggtctgcacgtggtactcgtggcgcgcatcctccaggggcaactcgagggattccatggcctcgagaatgacgcgcatcgactggacggtattgctgtagatgatttccttgaatgattcacgctcgtcgcgagagtatccaccctcgtggatcagcttcatctgcttgagaatggtggacttgcccgactctccggctcctgtatacccagtcagccatctgtacatattcccatcggaactcaatggatcataccgagcaacagcatcttgatctcgtttctttgcatcatcttgtcgcgcttgagctggttctcaatctcctcattccgcgccttcccctccttatcttcggtgctcattccgcaacccattttgacggtatgaagtcgcaattaacggtgtgaaagtggatagagggttcttcgtggagggatattcgatggtttgttacagggactgtacaaggcgaatcactgtcagcaagctggaataatttcttccggaaatatcgcattgacgggctcgaggaggcgttgcataggtagcacaagcaccgctgagcagaggcagacggcgtttcagagttggtgtaagcgtgccgatgcaaggagtcgccaccgagtttccagagcaaatagccaattgacaggatcaaagggggaaaaaaaagggtacccacctgaaggttcttttgcgatttgcaaaaacgaaggacaaatcggcaacagggtataaaggaaagaaatgaaaagaaacgagccagaagaattcaaatagaatccaatctggaaaagaagaagagagagagaagagatacaagttgttcaaaggtaaggggcaagacggcaagactgaggggggaaattgggaaagtttcagcagagaaaggggatacgctggtaataccacggcagttaagcagcgcatgggtgactggggcggttatcggaggaaatagtatggtgttttccgtacacagattaccgattacaaaacaataccaccccggcaactgcagtgagctgattgggcggtgtggggacctgactggcccattcagccccttttgcttttttggctggtgatatcccacgggcattgcatcagagattctattttcagaggatgtcgatgtatatggatgcatctatggaacattctgtttcagacagtcagcccttcataccaatgctccataatagagcactgtacccgggtactttgtatatataaaaatgccggtggactcctggaggcgtgcagatcttgtggagagcaaaactagcatatcaaattacaatgctagcaacaacaggaaacttagaattctggctcgtcagggagtctggggagcgaacccctgaagaatactttatgtacatttagtagatcatacaatttgctccccacacggtgcataaaccccgaagtctgacctcatctcagttctcagtttcagtctgaggaaacaaagaaacaaagcaagactcctgcccaatcagactagtctgcgcctcatcccatgcatccatgtgcagttctttgatacttccttgaaacttctgaggtacaataatacggacaacccaataggtacaacatacatagtaccatgccgagatagactgtcataccttcaacattactgctcagcccctcgactgatgaatccaacaatcctacgtcagcatgattgaaaaggaggtgtcagtgagcccagggaaatccccgaatcggttcgatagtgaaactgaagggatttcctcgttccaatggcgccctaaggttgtctccttaagttctgcagacgacccactggtgcccctagccgttttcgccgctaatttgcgtgaggagtttcaaagttgatactagactccacttggcgcctcgtggcaatggagactattgaacttcgcggtttagcttggtgtctaaacatgacctaaactggcgaaatgccgaagtcacgggatgtgctgataatacactatattacttagatacagcctcatacaagaataaattacagatcaccctccatgcatgcatgttgtagatcagttccaatggctgcctgcttcatatcaggtgacgtacatttataatggaataaaaaacccagcgctactcacaacctcaattccttcaacccctttacaaagtctacctttcgaaggactccaaccaggacactcaagagtgtactttgactcatcttttctatattctccggacgctcgcgcagcatccaacttgctagtgcgtgacgatgggtgatgccctgcggccaaatgatgatgatttcagcgaagtcctccagcagagtctcaagatatggacttcctatctaggtactggtgacaaacagagccctatcccccgacaagccatagatatgagacctctcgtcagtcagaccccgtctttcctcggtgatggccttcctttgaacgagaatatctcgttcgcttgcgaagaaaacaaatcccatgatagactttacatcaacggcagatcaacgtggaggacttctcaagggacctgtgacctaccaccaaaggtttttccaaagcaatttctattagcagttgaccgtcgattaagtgtggaattatccagaagattctcctctttcagactggcatagagttcaagggctctcgggctatgatgagggaaactacctatctgttctttactttgcatgggcttacatcctatctgctcgatgggttgagttgcttaatcgctctgctgaccacgaatgtcacatgggctacattgcggatcgggtagagggtcgattgccacagccaaacaatcaatctctggttcaaattgacatcggccacgatgcttccgtggaagaagtccgctggtggcaggctattttgggctctgacgataggtgggacgcgaccgtgaagtataatggccacatctatttgtcgtatggtcgatttcggcaaagaaggtggaattcaacttggccactaaggatgttttgagcgcaatttcagaaccaccatcgtcggaaaccgctctcaactatctctcacgtttctgtgtgcaccatcgcctctacgcccagtgctcggtcgcccttgctggggtactcttcattccattcctggggaagggaacactctcacttcctcttccaaggcaagcttctcagtcggaactaacacatcgtattaatggctcgcctgtttctattccggatcttctagctgagcacaccgaattacttcctaggtatatgacgttgagctccagcccgcaggctttgcgttctattctatgcagcacctttttcaatccagatattgagtgcaatctcgtcagcgcctggctgaacccggctcttgcgattctcaattccatctcacctaatgagttgggccctttttttggcaaatcgaaagcctctactcggacctctctggcttggtgcaattctcacaggtctggcaaatattattttacgtgacgtacggacgggaatggtagctttcgatcttacagcatcggcctgggcaaatacagcaaatacattcttgacctctagaatggggactagtgatggtgaatcaatacgccgcgatgacgaatgccggctgtcattcattactgcctgcgaaggccatgaccgacctccaatctggccttggaagccttttgggagcacaccaatttgcgacacagatctgagcgtccgacagcattttcaatgtgctcattgcctagaatacgagtcttgggaatggatgttgacaaatgacgattcaattcgggattttagaaaggataacaacgaattccctgatcaaacaccacactccgcccccagtatgacaccggcagcactcagcgattataaatatgatttctcttcgcaaatgcactcggaaggagtaacccgtgggatatttggatggttgagacgaactggttatcctcttagcgaaaaacccatataccaacattcatgggtcgatttggaaagcagtgacgaagaagaagagcccgatgatgccaaatctgacgtggaaaagcaccggagcgcaaagaaaaagcacgttgacacatggcttgacggaatcgaatagcgcttatgaatcgggtgaggccgtgatatcattgtaccaaaagagcagtctggtcccgctagctggatgatcgagacataaaaacacggtacatggccctgtattgccgtggtcagcggtttgactgatcttccaccttttcagactgccttgcacgtgtgactgttgtgcttatcattctaatgtccgcatcttaggtctctgtaaacagcccgaactggcggtcactatgatccttactcgcggacatgctctaatgccgaccaagagcctagtcgttctacaccactgcagaccaattgaaggggaaaagaaaaaaaaaaggccgaggatgatgattggacggcttaaccaccttgccccgctatgtactttccaaggcgagaatccaccgcttgcataatgcagtagatgggctcgaatacttagcccttgattgaagggattgacaattgacatgcaagaaatggaaaatggctcacggtttcagcaagacagattggcagagaagtccatatgctcaggtgtatgcatagtgactgactggatagactggatacaacctcgcacaagaataaattacctgcagttctagagccaatattacaaattgcgtagatcattccaaggatcgatctacacctatctaagccacaagacgtagatttatggctaatcggttgtaatatactcatacatatctacaacatacatattctcttctacataatatcccagctatataataaccacaatgtgaatcccatcggcgatcgttctaccgatcgaaaccaataaaccttggtacccaacgagagttcctcgatcgatgtggtttctcggtttctccactttaaaaaaggtacccttccccttccccaggctcccttcttatcaccacaatcatgtcgcacgaaatgtcccaattgggccctcggggtaatacgccaatccctcttgaaatgaacgacaagcactaacagtcccagccttcaaccacgcgagcagcagcgacgccgaggcggagtacgaccggctccgcgacctcgcgcgccaggaagcctccaagcgcggcgaatgtttcagtcgggtacgcaagcacccaatcccaattgcagttgtagttgtagtcattcgatcaccgctaacacccacccaccagtcgaaggaagcctactcgagcggcgatggcgccggcgccaagcaactctccgaggagggcaaggcccacggccgcaagatggaggagtacaacaaacaagcgtccgagttcatcttccgcgagaacaacgccaacgggcgcgtcgaggccgacaccatcgatctgcacggccagttcgctgaggaggccgaggagatcctggaagagcggatcaagtatgccaagtcgcatggacagacccatcttcatgtgtaagtgtcggaaacgagcccctaggaatttcttatcgtgtgcgctagacgcgacgcaacgtactgcgactaattccgcttcgcgatatagtatcgtcggcaaggggaaccactccgcgaaccatattcagaaaattaagccgcgcgtcgagcaggtgtgtcgggagctggggctgcagtataccaccgaggacaacgatggtcgcatctatgtcaacctgactggtggtgaggctgttatgcctccttcgactggttaccagggtggggctggatacccgggtcaacaacagggacaccagcaacaccagcagcagcagcatggacaaggacaccagcagcaacaacagcagcaacagccggacgaactcgaggagctggccaagaaattcgtgcccaggattctgcggaagctcgagaaggcttgctgtgtggttatgtgagcttgtggttcggtgtttgggacatatacatagatgcatagctgtgtttgtggacagatgtttgttgttttgcctgtgacattttgcgctgtcggtttctcgtttctagatcatctaccatctacataagtatacttcaagtctaggttcagccgacgactcatgatggcagggatgtgattatacccctacttcatatggacatggacattgccatttactttcatgctgttgaggacagctaattgaacaatttacactcccaaatccatatcataaatcatatcatcgtgaactctcatagctacatagcaaattgtgaaaacaagataactgaaacggggtatatccaacaaatacacgacttccacaaaatcatagtaaagaacaaagaaccaactagcgcgcattgggatccgacagcgtcgactccacgatcttttccacaatagcacgcaccatctgcccatcaccagctccgttgatcttcggcgtagcatcgatcgtctcaatcaacgccaatgcctgatctcgcaaatccccgacaacccgactggtgtgcgcaaagctgcccgtattcttcatatactgcaccgcatagcgcttgacctccacatccttggtattttgcttgaggatattaatcagctggcgattagacgggtccgagcgaatgctgtgaattatcgggaaggagaattttccctcggtgagatcctcgcagaaccctttattctccgtgtacacagtactcgaaaggttgaggtaatcatcgcagatctggaatatcagacccatgacattcaccaaggcaacgcagtctttccccgtcgtactctccgcctgcatcagtttcaccgcgagccgaaagagcccgcccgttttattgccgaccatttccaggtactcgtcttccgtcgggcaggtcagcgtgtcgcgccaaaacagatccatcccttggccccggtgcaggttcagcatctcttgtacgtagatgtcgattgcggccgggttgttgagctgctgaacttcttgcagcgcgaggaagtacacgtaatttgcggagttgattgtttgcgctgttccgaagatgttgtgcgcgacggggatgccgcggcggaggacggagttgtcttcgacgtcatcgattctggcgtcacgccgtcagcatcggatatggatcgggtgtgaagagggaggcggtgtggggtggactcacaatagtgatgatgtatgcagcatcgttacgaccttggtgatgatcgccaggctcgccggcgggacctgcagccaagcgttgaaggcgtggatcagttggcgccgaatatcttttcctgggtgttcgtgtacatagtcgtatggacccatgagaatcttgtcgttcttcgatgaccatgttccatccttgtacttggtaccgtcgacgctggacttgttgcgacgatgtccggtttttggaggctcttcgtctgtcaccgacagtttgtgtcggtgcgaggggctgtcggtgccatttgttgcattggtcgagctttcccgaggaggaacgggactcgatggttggaaggatgttgaattcatgattgcggatgggggatggaggggttcggtaggcggcagaaattagctagggacctccggggctagaagtttggttcatgtatagatgacatcaacacctctttttcatgtttgtatagctacatatgtagaatgatactatgataactatatcgtgaaacgtatcatgcaagatgtattctgcgtacatactttgtacctagtcgtagatggtatgatcggatgccgaggttgactaatcgggcggcggggctgagccacttgagccaacagtcaccagccaccttccaccagccacctgtcacctgccaccaaccaccagccaccgaatataaggttgacaaatgaaatacatcaatttgattggcaacgcagccctggataaactataatgatttgataggtcataagcagggacaacccaaatgtattcaataatccatagaaaatatcatgttcgctacagcaacggagcaagggaaacacggtgtgaacacggtgtgaatatacggtgtatacagtgtacacgatttaagcactccatacttactccatacttactccatactataattaaagtcgaatctgattgacgccaggggtggatctggaagaaagcgagttaagagtgtcccgatgcgtcgagttccctggtttattggcgcgttgccgggggcaacggcgctttatttactgcgaaccttggaaagccgcgaagggccccgactgacctcatccactcccaactgggacaacacgaaccttctccactttcttttttggatcttttgtttaagaatgttcctttgcttttcatttcggtagaatagctcacttttctatctcacatctgatttatcaatggaggctctattagcccattcgttcgattacctctcctcttatgagcctagcaagatccgtaaaggattacgccaggtcgaaggactcctcgcacagatatgtttatcaaaacctaagcccgtcttggaccggagatcgcgctcccccgatatccagcccgtcccaaagacgttgcccgagttgcgagacgatccggcctttcgggaattttccaaattgcaggaaagctttcaatggaatagtatgtctttgaaatttctatcgcaactagggcttgggtactaacaaaaatgcttcagtcgccatgcgcctagtatcctgtcttgaacaccttctcggccgagggagtaacgggacaaacgacatgctcattgtctgcacactggatttaatccaaggtgccctcctcctccaccgcggctcgcgctccctcttcgcccgcgaaatttacatgaacctcctccttgaccttctcgaccccatcaactgtccagcagtgcaatcagcaaccctactaacactcgtcaccgccctactggactgcccatcaaacacacgcacattcgagggcctcgatggcctcctcaccgtcacatcacttttcaaacaacgcgccacctcccgcgaagtcaagctcaagcttgtcgagttcctctacttttatctgatgcccgaggccttgacctcagcaccgatgtctccacaaggtctgcagcgcagccccagcaaacgcacctcagcgcgtagtccgcgctctgctgcggcagcagcgagtaaagtgagtcgtgatatacgtaccacggacgaaaagcagaatcttctagggaggtatctcaataacgtggaggacctcgtggaggatttgaaggagacggctccgttcggagcgacggtttactgaatgacctgactggcgatgattgactcactgcttgacgaccaatatgcgcgatgtccgctgcgatgacttggtgttcccttcctttttctctctctccatctcttttctctttactctttttccatcttcccttctccttatctttcgcccctcttcacgggcgtttacctcatgttccgtccggtacggcaattatgcgatcttctagactgatgcctcgtccccttttggcctgtcttttttgcctatttattcttcgcttcaatcctggaactttgtcgacctctactgtgcgctctcccggcttcgtttcctcgtcgtttcccttatgtctctttaatggcgacatgcatgtgtatgattattctccgtgattaagctgaactgtcaatatagtcctgatgaccaccaatatttcttcgtaattctacttctcaatgtaggcttcaacttgtaacctcggtttcgggctatctccggttatctttcctatctttctatctccattatagcctggatttatttcatataaatgagtcatcatatatgagtcaatgtagcacggactttaataaccaactatatagttatatacttcaagttcgacgttcgaagtggatcaagtccagtattaccgtggatcgcaagttcgatatatccccgctaacccaccgagatcgagaatcgttccacggtacaccttagccttcaaaatggagacaatccaggagttgctagcggcaaagccgtgcggaaacccaaagcagacgcagtacgtcgacacggtcgaagcatacgataaatgggcagaggtgtgtatatatatcctctttgccataatatatatacagcattcatataaccatttaaactgtatccactatctatcaaaataccaaaactaatacaaaacaggtctacgacacagacggcaacttcctccaacgcctcgacacaatcgagatgcgctccctactaccccaattcatcgaccgggtaagcaagcgcttccagccaacagataccgagaccgaaacaacccgccctagcctagtagatctaggctgcggcaccggccgcaacacaatccagctcctgaccgcgcttagcacagccaataaagccacctccttctcggtaatcggactggatgcctcgcgcgggatgctagacgtagcgcggacggcgacaggccagtatgcggcggaaaatgcagcacagacgcacgttgagcttgggatccttgaccttcttcagcctgaggtatcgaggacacagcttccggcttcgttgtatgcacccggtgctgtgggggtcatatctacgctggtgctggagcatattccgcttgggcggttttttgcggctgcggcggggattatgaggtccggggcgtatttgcttgtgacgaatatgcatgcggagatggggatgcggagtcaggccgggtttacggatgagaggggggtgaaggtccggcctacgagttattgtcatgctattcctgatgttttggatgcagctagggaggctgggtttgaggttgtggaggttgttggagcgggtgcggatggggtggttgttaggggggttgatgatcaattgacggatgctctgggggcgagggcgaagaagtgggttggggtgagggtttggtttggggtttgttttgttaagacgggatgagatggaaagtagatcaacggagatatcattttatctagataatgacttcgaatccaacgccatgagttgctgttatacacttagaagaatttcagtagtctgtcgcggtgttgtacaaggttgggatgctctttgagcagttgtgctagccggttccgtttccagcctagggtatcatccaagatcagctgcgtgtaggcaaagacgctggcatcaaagaggcccgggtttggccggccgaagaagtgctcatccttgccgagcaaggtggatagcgcctcaaatgcgccacccgcatcgccttccagggcagcggcgtcgatgtagcgcgatgtcttgaggagctcatcgcgggcggcctgttgtagctggtggcctagggctgcgcgcacgatcgagtttgaggttgttggatttacgtagagtcggcgtgcgacggcgttgaagttctcactgtctaggtaaagcatgtataactagacacgtcgttagctccgagtctagggttcgtttcatatggaattatcggcctacccaagcgctgcgtatccggttgtccaaaagcgaggcataaacctcgaaccgcaggttcaattgctgttcctcctcgcagtggacttgttcaatggcccatttttggatcttgtgtgaagggatcgggtttgaggcgtccgcaggcagcgaggggaggaggaaaggtagggagccattcggcgacgcatgattgttggacgaggtgatctcaaagtcaattccaacgaatttcaagtatgcctagtgcgagaccgatcagtgtggttccgacagggacagctacacgcacccttgcatgcgagtatagacggcacgaacctgccatttgagacattgaggattgaatgaaggccggccatgttgtacaccagatgcgtcggcgaaaacgtatagctggttgatattctcgtgtcgcggtcgaaggcgttgaggaatctcgttggccggataggtaatcaacgggaacttgtcgaagaggcgcctgataggagcagggactgtaaagaatggactggcattggactcttctggagggctatcggggcctttgggcggcattgtggtggtctgaaatccaaagtcgccaaagtccaagtccgaaagtccaaaagtgtccaagtgccgtcatcgaaacaattccgacgcgccaaacccgaacaggaaggtattgccttacctaatgatggccaggtaccgtcctccccgcaccttttctgacttttttttcgtttgtacttgggaaaagccggaacttacgatctataacctattcggatcatatagattcgatatcctagtgcttattctattactcgtggtgttggtgcgatcacatcagccccggtctctcccgcttcaccgttgaagaaaccaaacctccacttcgctccgtctagactccaccttttattctgatctgctcacgcgaacaactttgacaataccggcatacatatggcttagttcgtcaccaaatacgaggcgtctgacggtcctagcggaaacgggcgattgtatgcgcggggtatcgactagcggttggggttctgcgacacacggttgcgacattacgaatcaatcttgcgtctcaccttaattcgacggaatcatacatattccttcgccaacatgcctctcgacgaagaaggtgccaagtggtcctggtaggaatatctcgtacattgtcaatgaaaccgggctaaaccgttactccagtgaaccatgcattcgaggtcaccgatcgtcaaaatgccagcacttcgatagactcatgatgaaggtccctaaagctggccgacctcttgcaaaatgcccccacccgaagggaacctgcagctgccagaagtcatatgccgtgatggtccgcattccgaaaggtaaggatatatttgtcaacccactacacatgtgtttgcgtcgtactgacttgcctaggctcatcatgtctatgtcgtccgctatataaagttcctatggataccaacgagtcaacccagtctcccccaccatctatggtttccacttcgtcacctgcgccgggcaaggtccagaagtctggaagaagacaaagtactatgcaagcagcacctgaaaacatagctcgggcgttacaaaatatgccagacaaggttaagctcgaggatggaacatcgaacttgacttcagacttctcttcacaggtcgggttagatggtgcacacatatcttctactacacaaaaccgaagtacgccaacgcccacagaaacttccaggcaagactcgcagtctccccaagtatcaagctgctgctctcaaaaacaaaagccaaaggcaccaaccccgaccccagctcctactgcggctgctgctcctgctcagaatggtggatcttgctgtggagggtctcgccctcctacgacaaatcaagctgtctacccagaggccgaccaatcgcaatttcagccgcctattgcttgggacgatcagagttatatgcaattcccaatgcctcaaatgtcgccctggcagaattcctcgatacccacgcacgaagactacatgcattccgccatgcatcaagtacatccccaacacccaagcctccataatgggtacatgggaatggtgctgccacactctcagccccaaattccccagatagggatgtcactcggtgtgactgcaccgccgtccatggcgtactccaacgagatgaacggtcttggaattacgcaagcctctatgagtccatacatgctcaacaacctcgagccttcctacaacgccccaccaggcggcgactcttgtcatgactgtagctgtggagaagattgtcagtgtcttggctgcgctgctcatccattcaataccacaacacgaaaacatgtccaagagatgggtgccatgatcacctccaacggagatgacaagaacccagaagtcatcaacccttaccaaacctcaccttaccagggaggcaccccttcgacctcgttcccttacttcattcaaagcaccccttcaatggaccatggcttccagccgattccatttgatagctactcagacccaaactctaccttagccagcggttactcctcccctctatccgcaaaccaccatctaaaccagcagttaatgcatccttcggagtattacaccctggaatacccagtcggcctaccaagcgcctgttctgacatgacggggagctgccaatgcggtagcgactgtagctgtgtcggctgtctcacacacagcggccacaacggtctttccctggatatccctatccccgagcaccccattcccgacacagaggacaagcaaactcaacactcgcgccatgtttcccgcacaagttccgctacgtctcgatcttcgcggatcccgatattagacaatgtgtctgtgccctgccttagtccgcgcactttggagacttctaggatctagatgatctacgtcttgatgattattaccattttctttctctactcattttttcccctgcgccgtttttgatcttacatgatttatgatctctcatgataccctatctagaatctctgctctagacggccacaataatagattgactgtttgaatgtttgttgagtagaattcataccactatttctgctattgtcttttttcttgccttctgtaatgttttttttttcatccgtagaaccagacagggcatgtattggcgtataaactagagacaccccgctaccccgggaccacttttccttaccctaataagccctacagactgggacatagtatattttgctaatatcttctaatatcctatttgaaaacaatatgatgagcatcaatgcattgggggatatcataattcttaagcaaaaggtaatatacagattaaagacagttactcacaaaaccccagtcaacccttattccactttccgaacttcacatagtcatcatagagcgacttgaacactgcacggccagagacatccaacgcagcgttaagcgcacgcatagactcacgcgacatgacatccagagccgcataaagaccaggcaagatagcggccttgacatctggagacagcgacccacgcagcgagcactgcgcatactccataacaacatactgcaagtactggccggcaatacgcttcgccttcttcgtctgatcagtcagggcctcgcgggatgcgccaggctggggacggaggacggccgagacggtagggtcgcacagcgaggtcaacagacgggtgtaataggtagcgtgcgaagcgtcgagcggggcgagccagaagggctgtgagagggtgggctggaagcgggagcggccgcgtttgcgggaccgcgcgaagagacagcctagtaggcgctgcatggcgtttactactaggtggaagcggccgccgatcttgaggcgttgcaggctgagtacgacgcccattagtcggcacaggcgggtgtagatggttggtgcgtaggctggggagatcttggggccgattttggaggaggcgctggcgattgcgctgagaatgctgtcgatgttgcattgggtgagactgcgggtgtggctgcggagaaggaggtccaggcattccgatgcgaagcagaattggtcgatgcttgtgctttggatgatggtttcggcgagggatgtgcagaggagggagatctcgcgtgatgtggcgctctctttgtcttcgacgggagagagcgaggaaacggcgaggtagagcacgagtagtctgtagctggcgttttcgccaatcaagccaagtccgcgaacttcgcagatcgtctgggtgattttttctacgggcattgagcggaagcgttcagtggtggtccggataaagagttgctggtcctcggcatagagagactgaagagcaagcgtctcggcgcattgtaagactggctgagcgatgttctcttcgggtcccttgcaggcaagaagacgtcgtcggatcaaccgagagggttccgagtcaacggtcaattccatgtaattgtcgatcttggaaagaaacttctccacttcgacgttgttggtggctagatcttcgaaatcctctagagcatcgatggtcttgataatagtaattgtttcctccaacttctgcttcctgcactggtctttgacatgtttcatgtcagccaacacaaagtcaaacactttttggcgacaagcggcaagttccttctccgagaaggctgtctgcagctgctcgcgatgaacccagagctctgacaaggtcaacctcagaaggtaacaggccatggaatcacgatccacctgctccattttagctgtttgcttcgatgcccgggcgaagagcttcttgaacatcttgttccggtcattctcagatgaaaccaggagctttgccgatatcgcgtggtgcaggcttcggaatgctttcatgatctggaggtcgaggtcggtaccctctaatggtacggctcgagcagcagtccagatgggctcccagtcactggtcagtgtggcatcacacttaggcatggcagccaatttcgccatcatcgtaattattccaattgtgacttccggagaactgtcctgttcaagtagaacattttgcaacttattcaagatggtggttctcagtccccgggtgatcaacggggctggaaccctctgcaagctcttgacaagcagtttacgattgagcggatcttgctcgatgctctcgttgagaagaagggaaagatcagagacaatgaagggagcgttgagcatgtattcatgacagaccacactcgcccatgcctgaaggaaccttgcttcttccgaaacagcctccaagggaaacgacgacgaatggtattgagcagctgccagggacaggatatgacggaatagacgggatcgatcctcagaagatataagagcccagacttctggaactctgacaagggctaggaaataagctagaccaagggttgtttgggaattcacagtctctgtgcggccattccatggcgccttcatcgacttcttggcatccttggttgagatggaggtgatgaggtctatgacatccttggtggctttgacgaatgagcctagctgctcatccctggcgtgtgccttggttgcagcaatcaggaaccggtaagcctcccacgattccagaggagcgagttgagctttggttaggtccttgtggttgcggtgcacagtcttagcggcgacttctaccaacggcataattgtacctgccatggtattatcggctgactgcagggtgttctccaggaaattccgaaccaaccgccacagacgccatcgccagtgcagagcctgcttcgacgacagagtagagcttatggtttctaggagagattctaatgtcttttccgattccgggaacgtcgagactcggccacggaaacttgcctcgacaagaacaaacttagcataagactgaggggtgtcagcgactttgccattttcagctcgcgtctcgctagcagcggtgcgcatctgggcagcaacatgcgtctcagtgagcgaagtccgcatcagctccgagtaagcatccgccaactcatcatcttcccaaaccgagaataaactcagattgctgttatcttggcgagcctcatccacaataaggatttgattgtgccacaattccatgaagctgggcaggtctcttgcggcagcgaaacctcgtaacaacggcagcacaaccttgctcttgattatgtcgtagtccctccgtttccgggaaccactctcgcgccattgtaacaggaccttgtcgagcaatgcgtcaagaagcttacgcgaatcacgtaaaccggagtttggcaggaaaatatcaaccccaagactgataaacagagccgtcacattccactggaccttctcaagaccttgttcgaaaagacctgtgtaattggcatgcgccagaatggtgtgaagagaaagaccgacctttcggtcgagagcgacctggaggaggtgctccaataccgagatgaacttggaagagaaggtagcgaagtcttcctcctttgctgtagaaaacgctagctctgcaacagcgacgaataaagtctccaaccacggcgcttcatgtgtctgcctccggaacacatctctaggaacagcacgcacggcgttgtcaaaaagctcaggaagaagttccactgatcgccaaggatgcatacaagcttcattggttgctttgttttccttggctacggcaaactcgcgaatgatcggcctgaaagtatcagttactggtttgaccgagctccagtcgggctcatcttgagaataatcgattccagagcctccacgctcaaagaatgctgcacgagcgggaagtaagacatgcagggcaataatgcgttcaaccgcatgtagcagattggctcgctcgtcggtgtcgagtttggcggaccgcaggcaaatctggagcctgagcgcgtgggcgaagcaatgtctcgcgaagaattcattactggacttgttgtccatatcatcttcacggtaagaccttgattcccacagctccaccaccgagggaaacacgtatagcaagtgctgaagatcggttgttttcccctcatgcgagaactgcttggcggccacggcggctacccggaatgctcgacccagcagcatggcgacggcctcgggctcgcctctcagcgcaagcttcaaatgagagtttgccacgccatcagtgcctagtgtgcgctgtgcaagtgtcacaaatccgtggagacaatccaaggcgcggatgaaggcaaggaagcatgctgcggggttctgacgctgctcgtccacgtccacgtccatggcgtctgcatcattctcagttgtcattctcttgcgttttttcccttggcttcctcggcgatcatcgcgtgtcggggatgcagacagtgtgtgactagactcggagtcagagctaagggttgctcccagaccagaaaatatatcggcctccaaatcttcgagtgtatcgcatagaatcgataaaaatttctgatctctaagaatagcagcgatattcttcggcgaaatcaggttgatgagctgtcgtaatagaaggaacgaagccgcgtccactctatagtttttcccacttctcaacctctttaatagccatcgcagaacccattcctccttcggggtagcgtttgtttgaattcgaacatctcgatgaacttccgggtgactttcacatagtgtcaaatccacaccgatgatctgtgccgcttcgtgaatctgagtcgttggactggcggtgcccttctcaaggcggaggagcgcctcttgcgatgagcgcggacgctgtgggtgcgcaacacattagatcccggagaaagacgtgtatcattcgaaggtcacatttgacttacctccgcaatcaacggcatctcgaaaaaagcaaattattcgagagagtgggtatttatttgtcgaggaagagaaaaaaaaacgaagaccaaaaagaaaaaccgcatattgctccgaccgcctttggccgagtcgactcggtccgctaaacctcccaaactccttgcactccacacgcctccattcacctctataattccacataattgcaactggttcgtgttttaccctcggaattcactccggctcaattgatgcttatttctgcaccgatagatttatcgcaatggctgaatccagtgaatccgggccgatcgcgcgagccaccaagcccgtcagcgaagctttgcttaacgagaaggtatgagctagctgggatcttcaaatggggaagttgcaatatagaatcataccattgatatatatgacaattgtctcggtctggaaggaaacatgggagaacccgttggctaaccttttaacgtcatataattagtgggaccgcgccatctcctctgtgatcatcaagtcctccctcggtctgtctttcggtgttgtcttctcggtgctgctcttcaagcggaaggcttggcccgcgtggattggtctcggcttcggtgccggacgtgcttgggaagaggctgatggtacgttcatctctctaattcattcggttcacgggcatttagaggggcatttagtgaagttggagcttcgggtcactataagataagcacacttgagcttgggcagaggctgtatgctgtaattttttcagcatcgagcttcgtaggcccttcaacagtgacccgactatccgcttttctccgagcctacctatctccaagatctaagaatgactgagctaacttgtacttagcctccttccgccgtggtgactcccctatcagagatgccctccgccgttaaagaatagctgtcaagtgtgtatgatacattgtacagaaggcaagaggccatcaatgaatggttgcttcttggcccagagaagaattggtataccggttcaacatcaacaccgaacgaggtgtttcctagatttttcccccgtcttttgaattcagaaaaatgattgaattgaaaacatctcctggcacttcacttccatagcatagagaagacgtacttttatcggtctcatttggcctttttggtctaccagaacgaggcttcgacaagccagaatgccattcgtgcgctttgttgattatagcagattgtagaaagagaaatccatggatatctctggtgaattcgcctgtaaccccattggacatacggagtatgttgtagatgaattccattagcgccaaaaaatctttagaacccgtgggcacacaagatataaacacattaccaaatactgtcatctactggaggacaaccatggcaatatgacaccgttcatgaaaaagaaactgaggttcaagatgccaggcagaggttcccggtaattaacatcacgtgtgtggacgtctagatagtttatcattggaccgctggaatatagttatactattgcccctatattaacttgcttgccccgaggattttgttcaagctacaacaatgactgcgtgtctaagatgatgctttgaccggagtaaagcacacttttcgtggaagctcgtttgaagcggaatacacttttcgtacctgcgttcaaatcgttatcaaaggataatctatctctattcttgcccgaacaaacaagataggatggatcccttcagccgactcccttggtttgctctgcaaaatgtcctgtccgctctgccagatctaccgtcgctccacagactacacaacacatccacggaagtcgcaaccttcctgcaccaaaacaatgacctattcgcccggattgtggatgccataatcgaaaacacggcccacgaaagaagcctgttcccggttgtgcagcgtgatgtacggcaactggtgatcatctgggctgagcagtcaagaaggcggcaacagcagccaactgaacagaacgaacagcaagaaacagccggaaacccgagtgtcctcgacaacctgcgataccttgcgagacatggtttcggccgcctaacaccgaatttagggagcatatcaccgtcgacgccagcagctgttctgtgtcggctgctcgcgctaatgtcccggttgcgctgcctcgtgcatgcgtcattccacgcactggttgcgaagtccctccagctccggatcgagcacttaccgaagaaaagtttatatatcaatacacgcaggcttgggcccagccatcgtccgcaggggatcccttatacgccggttgatgttggtccaatgatgtgggttgaagagcagcgcctgctcgagagctttttctgtattgccatcttctacgaactgcgcaagatgtatgcgaatttctccgtggtctcgatgcgatcagaaaccttccagatttcgtcgcacgatacggtcgaggacttttggaagaaagtctttcagggcgagaagggtggccagctggagcagatcgccacgactctttcctggttagatggtcaggccggacgacgtgaaaacgtgtactcatggctggcctccggaccggtttcaacggaatacctttcttactacccatgttatacaccgttgaatgatgagcaatgggaggacgaaaagacctatatacatgactatcattcctcgcatggtgcaatgtctttgagtgcagctcgatgttctttaacttcgccgctgcgatgcgtggattatgcggcctttcgcccgtacggtctgatcttctggagtgccactcggatggacgctttgggatttcggctggtgtttgggattggccaccatatgtggtttgcactgtcctttgtcctcacggataaggattgggaagacctagtcgcacggcagctggatcggagcttcaacccgatcacaatgtaaattttgagataatcaatccggaaccttggtttgctcaattcaattgctaacttgaatctactattctacatgggtcggcaattatgaacttatttaccctgccactgcttgtctggcgtctagataggagaaacaatactggggaattgacccgaggtaaagaagccttacatggttctttccgttgttcgatccggccttcatatcatgcgccattttcgcgcatcagaactcgttcgaattgaatcgctctgtcgccagcttcttgtaggctgttcttgggcggcgccgagggcgcaggcgtacttgcctattatggtggtgatgcttagagcagatacctacttatgttaccttcttaaagaaggaacctacacgcttatcagttgcaccagcttctagttgaaacaaaagcagagactggacagcctccgaacttttaagaatgatagacacacatacatcacacaatgtcaataaataggagtgataggtgtactctttatacttcctctaggcaaataagtttatcctttaagtagagatagctcgtaaaaatggtagtgagcctattttggggacagaaataactcctttccaggcccgcggctttactacatagccagggcccctaacagctagagctcctggcaaagattgatttttttgaaaagtgtatttaataccctcggaaataactgattactccgagccattgaccggtatattatcaacctaggtcacagaacaagagaaagtagcgaatgaaaaaatgaagtaaattgagcaaaaaaaaaaagagagagaaagttcaaggtagctcgcagtttattcggcttttccttttccttttccaggcggaggacgcaaattctcttcaacggcccgaactggaacttcaagacgcctgggcatcagggaagggccaagagtgacacctatgaagtccaaatgggtcaccatggtccaaagcgcccaagcttcccatgacatccccataacaaggaaaatggattcatcagtctcgtacgcgtccgaaatctccactttcatattgggcggtagatcttggatcgctttttggaagccttgtaggacgtcgctatgacctgatatgtggctgtgaccatgcaaagtcagtttgacaagtacatgtttctcatttgcatgcgaggaaaggtgaggaatgcgcgaggggatagtgtagttcttgaacacaagtctgatcggctgagtaccgctaatagtttccatcacagcatttggagcatggggcggtttctgtctttgaatttcttgaaataaggcggctgtggtcacacttgattggcctttgaagtgctgaactgcacggaatagtcgcatagtaaatgacactgtctgagctcgaggatttgttccctcattggcaccacaggccgccagcatttggatcgttcttgtctgctgcgctcttgtcgcagcaccagagtaacaacaatcaagtaccccgagtacatcgacgtatttcatagcatccggttcgtcccaaaagtttgcacgaatgcgggaccatggcatagacctcttgccggagacaaaagacagacgcccgtcagatatcattccatgcccgacgtagtagaatacgaataaggaatgccgtttggaacgatgacagtcatacatgacttcgcggatcttgccttgaagattccaacttggtatcgtatctgatgatttcacaatgtactcggtatactggatgccgaaggtttccatcactttgcccatagtggtgatgtctttgtctgcgccagtattgtcatcttcccatcgtacaaggattgccactttcagatcgtggacattgccacgagctgctgataccttttttaggtctgctttcagggctgggaggtggtgaaccagaggtgttctcgaagggaatgatgtcgtagtggatgagaatgaaaccggggcagaatggtgagacgtggtgggcgataccggatcagacggctcggccattgtgctaagcgatgttagtccagagtacggattggttcacgcttagtactcacgttgtgaaaggtgggaaagaattgatgctgagtgtgacagtctgagcgacgacggtggagaaaagagggaaaggacaagtttcaagtaggataaactgaagcgttagcaggtgtaaagaagagagttgaaaagtcttgtaaagtatgtagataggtgtagatgtgtgaagagaggaagacagagactcaaggcgactgctgtttatatagtcggccttgaaccatagattagacgcccgtgtcccaaaagtgaagtgaaccacctttctatacctatttagagaatcacttgatttatcaaagtaaagcagtttaaattagcaagaatagcagtcttgttagctgttctcttagatgtctttatcaactatatatacaaaacacgcgtctacttaaagagacttcagttttatctaatttatttctattattcctcggggttttcatctgatatttcataggtcaatacttgcatgcattaagagtgtatgagctcttagcgagagtgtgattatgaatacttaattgttcagagatatcgaggttcctagatcttattattagtagaatgaatgaatgtctgactcataaaccccggagaagatccatctctagaagccaaggaactaggaagcagtcaaatattatcatgtcatcgtaaatttattcgcagatagggaattaattatataaattcaagcgcgctcgacagcaacagcagcagtgaaaacaaatatcaaaagaagatgccgtccataaacaaaaactcaagtccgctctcaaagcttcctgtccgaagtattcggacctttccgatcatccaacccaagcgcatcatcaaacgacctccgctcagcataaccatgagcctccatgtcattggggtcctttccgtatgaaacggagagatcctcagcatcgatgtcaacctcgttccaggtagcacttgtctcagggacggggaagaaccacgtcagagcgaagtacacgccaccggaaacaatggacccggtgaaatagttgatgttgtagatgtattccgcgccgatgggaacctcgcgccccacggcaccggcgaagccaacgatattaatcaggataccgcaaatgtatgcggtataggcacgccaggagaagccgccgttgtaatagtagcagtctgttttgctcgcgctgtagagagatttgacgttcaagaagcccttgcggacgatgtagtagtcgcagatcatgacgccggcgatggcggagaggaagagggaatatgctgagaggtaggttgtgaagttgtttgaggtcgagagcaggttccactgtggattttgttagttttggtcatgtcatatgtggggattgaataaacaagtggaagaacgtactggacacatagcgaggccgacaatggcgcagatgtaactacctcgtcggatgctcatgtatcggggtagcagtgcagtcagatcagtacctgccgagatcgagttggcggaaatgtttgttccgagctgagctagagcaaatccggtggcgatgacgaagataccgaagcgctggccggaactggctccatcaaggaattttgcgaggagatcaaggggattccatgtgtagccgtcgttgaagatcaccgatgaggaggaagacacgatgattccaatgaatgaggtgacgccaaagccgaccggaatagtaaatagctgggcccaaattgcatcctttggtgttttcgcaaatcgtgagaaatcggggttgttcatgataagtgccgcgaagtttccgatgcacgacatgattcctttcaccatcgcccatgaaagatcgcttccgtggacggtgttagacttgtggataatcgggccgagaccgtgagcacgggaaatggcccaggcaaagaaagagatggcagcgatgggagagtagatcgccttagcggtgaataggtgacggactttgtgaacggggaaccacaaggctggaagcgagaccagccagaacaagaagaagctgaggaagttcttggtgtcgacgccagcactggcagagagaccattgtgaaggttccggtagctgggccagatggcctcgatcatgacagtcacacactgacctagtaatgtataagtacgcgtgttttcaccggattggaaagatacatacctccgatataactctgcacgccataccaaatgatagccatcaccacgcggttaaggacgggccataaagaaccccatattccgaatgaagctcgagctgtgacgggaaaagaaatgtgatagacagcgccaattcgtccagtcaggcacacgaagcctgcagccacgaaatatccaacccagacacagatccaggactgccaccaggaaagaccgtcgacaatcatcgaggaggaaatcatccatgtgttctatatcttgtgttagatgccaccaggcttcaaccgggcaccattttgagatactgacaatattaagcgagtctgcaatccagaaagcaacaaaattgatccatctccattgacgtcgttcagggtccactgtattgtttccataaattagttttgcattctttgtggaccacgatgaagggaggatctgagatcctagaatggtgagtctcacctggtcgtagatcactgttggtcaacatcatctgggcattggtgagtccctgctcgtgctctacggccagcttgtcgagtatccatttgaactggcccatgttggcgggtggacgtgtagtcttggacgtataggcttgttgctaatagttgccagtagagtgacgtagtcgaccgaccaaatgaagtgataatgcaaatgtatcgcggaggagttgaacaaaagacgaagcttgaagcagggattataatggggacatcagtgtcactttatacaattacccacgtggaatgactctggggcgaccctgtctccatcgtgaatcctcgtttccccgagtgagataagaaattcgttgtctgagtgtctctagttttggaagcatcgacgatgatcggagccagtatgggcctatcatggccgcttacggacagtgaacgaatgagttcaagtaagacttcccgacgttatctgcaaggatttgccggaaaattcgcaaccttgcaatgttgggtccacttgtctccatatcaaaaatggtatcagagacggtgattggtggaccctaatctatacattgatatggagaaaacctggagatagaaagatcttggcgttgactcgatgagatcgagtaataagataggtcacgtgtataatgcctcaggccagattccacgcctcaggccaggtatcacgtaagcgtctcacttgggatgtcagtgcgaaaaaaaaaaaagaaatatacaacatatgtaccagatacgcttacttatattactatatctcatgtgaggcgaaagaaagtaaagataaataatatgttcgcatacatactacagtatatggagataaacagaagtggcatgcgagtgtgcaatagtgtataattgaattcacagatcaactgtgaaacgagcctcctgaaaaaaaatcccaagtccctatgcaatgatgataaacaatatgatgaaagagaagatttgctccagtgaaccagtcacgtgtatactctccgatgtggccgactccctcaaatgcgatgatgatgatgatgatgatgatgatgatgatgatgaataacacagaaccgagttcccgaaaaatcctatgtggacacataagaaataagataaaaatgaaacacatacatgaggcgaaacaaataagaaaagatgggacgaacgagaatacaaacaaacacatctcccagtcggatacatggccggatgatcagtttctggatttgtcgcagacaaataacaggacaaggacaatgaacaagataatacccatggtaaatggcaaaaataaaactcgaagcaacttggggggtatcgctgtgacgggtatggatggcaatggtgtgataaacccgacaatgtaggcaggcacagatgaaagcaaagagtgggatatgatagaatagacaaacgccggaaccttggttgatgctgacatggataggaatacaattccagatcgggagagggatgggaggaaagaccagcacaaaaatgcagtggtcgtggtaggagtgggcgaggaaagataagatgtgactctcattgcacgaatgatgagttcgacgttgttgacacagtgggtgtcaggttaggagagctttccttgtcctcggggcttggagaatcactgcgatcatgggcttgatccctttcgcgctcggccgatgaggagcgcttgaagacggtctggccgatttggcgtagaaggcccatgcgctcagcgcggagctcttctaggtccagacgctgaacggagatgggatcttgcttggagatcttgcagaaaagggtcgagaacaagtactggtcgccgctggcatcgtagaggggcaagtagcgataaccttgcgagagactggtgagcttggcagtaaaagtcgccagctgcacactgttgttattgcctgcactgcggccgtccattgagctccagacagtccatcgcacaaagacaagatcgggatatttagtttccagcgagagcttgaacttgtcattgaaaacggggctgtagccattgctttgctcgatcttggtgcggcggcgatgtggatatccgataccggacatgccgttgcgcccggaagcatccataccgccttcgccgaggacgaagctttgaccacgatcatcagcactgaacatctcaatctcaacgtaagggttgatgctgtcgtcctgtccgatggtgcgtggacgggggagttgttgtgcggaaacaacgtcaactgagaatcgaaccagtttgcgctccatcttgcgcttctgatttccatcaacagccgggaggcgaaggctctcaggcttgaggatgtagccggtacgatcagtcccagcggcgaacatagcctggttcatttgcatgccgatgtcgtaagtttgccagttgagtgctaccatttgcacaccgcggcgccagaacttgttcggatcaaaattagatgaacgaagtcggaatccggaaggatacactcgcgtaaggtacttgcggttgtgtgcttctagtgcaactttgttgtcgtgactctgacagacactctcgaaggaccgctcagcaaacgagtatatatggttgtaccgtctgctctctggagacgagaagctgcgccatttgtagccgcgggtgtagacacccaagtcagaaagaggcttggtaatcttgcttttctggcgccgctttttctttttgtcagtgtgaacagacactagagctccgtcactgtcttcagttgcactgctcatgctcgtggcagtaagcgagcgcctatcctgcaagatcaaagggccaacgctgtcgacgggacccattgtaggaggactcgagagcgagggaagagctagcgtgctcgtctcattgagcgtcggtcgcacaaacggcgtactaacactgcgtttgcggccgtgggtgccgacggtgccggtattttggcggggatcaaactcattctcgtcacaggtcttgactttgaccagaacacgacccttgagctcttccggtgaagggaggatatagcagttggtcatcaagggctcgaggataagacgttccttgaatgtctccttcatgatcttgaccattgccagttgctgttccggattgcagtgcacctcaagagaaagaataagtgggaagtcgcatgtgataaaagcataccggttgatgacggtgatgcaatccgcaaagaggacactggtggtgagagtccgcccgtgagacactatggggcgtccatctgcaccatcccagcaatcgatctcgacacaacgacacccttgctgaagcgcgctaacgtaagcctcggtgcttgatgcaccagccacttggcggcccaggagataagtgttgtgagagctcgagatgaagtattcgttcaacggtcggtcgaatctcgactggggagcacgtgaagcgtagacaccgttgctggacgaggacaaaaatgcggcaaatgcatccaggttcatccgcgacacaggtggaggaaggtcggatccttctgcagaaggagtgcgagatttagaggccctccgaacgtacttgtcgaacagtgcagaccagtagatcctgtcggattcgatgtcttcattttgcacatcacgaaggaaagtcaagaactcttccagagtcatgccttctttcgattttgcggtatgaagcttgaagatatctttgacatcctttcgttccttcagacgcaaaaggaaatccttgaattcagaaaaatccaacctgccgttacaggcagcgtcagctttagtgaattgtgcccgaagcatgttcttggaacagttgatatgcaagctgcggcagaccttctccacggcagcgaggtcgagactttgctcctctactagagggaggccctgcgggaaaagtctcgacatctcgcgctgccagtgtgcctgcagaaccgcttcgctttggctcgaaccagccagaccagacatgagatcgattctgtaccgagagatatgctcaagagtggtgatccacaggtcaagaatacggtcgcttggagcgataagatgcaaggttttaaccgctcggcccttggagcgatcagaatccgcaatgacaatggtgaaccatcggcgctccaaatcttcggggatctgatgttcttcccggtaattgcgagcatcggcaccaacccggatttctttgatatcatcgatatagaagcgtttggctggattagagacatcccaaaaaaccttggcggcatctaagtcaaggaaaaagcggacttgctttctgtgtttcttggttaccttggtgaggactgtgcctcgctgcacagcagagtctaccttgggcgcaacggcaacggcgggaacgggaccagcctcgcgagccctattaatacgactcnnnnnnnnnnnnnnnnnnnnnnnnnnnnnnnnnnnnnnnnnnnnnnnnnnnnnnnnnnnnnnnnnnnnnnnnnnnnnnnnnnnnnnnagggggggagcgggcccacccgggggagccatattaatacgactctcgctgcgaagactggatgcctctgagccagcccatgcacccaggttgtccaaggtttcaccggtttcatcctcgttgcttgaatcaagggcgctgtctcggacaggttgggaaccggttttgctatcactgcgccggcgcatgataatgggaccagtgctccggtcccgcttctcgttttgggtggtagactgcctcctgcgagtcaatttgttggcggcgcctctcgagattcgtctcatgagacccggcgccttggacggagctgggtcattaaagctggaagggtttgcgtttccaggaacggccatgatagattcgccgaggtcgagggggcctggcgtaggcagggaagaaccgttcactcggccaaagaggggggtgccagcaggggttaaactatagggtgtgccgtgaccagggatggatgaggtaggagtacaggtcggagaagaggtgaaagctcgtgtggaagggggaggacgagatgtgacaacatggcggagagaagtcggttgagggagagatgtcgcaagctttaagttggattgggtgtcagcatccagagtcggcgaggtagtcgtagcataagccatgacgaatatcaaaacgacagctcagctgtcgatagaggaatccaagcctgtcgtataaagtgccaacgtccgagtcacctggactcagaaatggacgaataggtaacagcgtatgggaccggcctgctgtcaaggttcgcaaattttatgcgatcagagccaaaagagtattctgacacggcaaaaaatgatcgttcagccacgtcctcagcagaagttcaccgttcctgaactctgctgcatcttgggctggattaggtgtagtgcggagagccctgccggagagcagctcacggggggaaataaatcgcaacaaaagaagatatgagcgattaaaaaagtccctgataacaattgcaaagggcactggccctgtgcaacggccaatctcccacgagtgatattctcagccgatgctaaccactggggatagaacgtcacaaacgaaatcaaccagggaatggtttccagcctcgaggaagtggaacgtgagtactcgtcttgcttcttttggagcccggccgattctctgtatgtccttccaatgataccaatgctacccctctcttatgcgtgtcgatctgccggtgcgtgggggaagctgctgctctgcagtggaagcggggagtgctgtggtatggaccaattgatcgtggaatcaccgagtgaattgggcaaggcagcgcagaaccggttcgaaattgaagggcgtgcgccaaagcgagtcaaaggccgaatgtgatgcgtatgcaggtatccttgccagagttcagacaagagccccaagaaccggctttgggtgcttgcggaggtggacaggcggcagcaataaaaaagacccaagagtcaagggttctcctagtccgacagggttcgtggcgcaattggctgagatcggagactagcgatgcggcaggcgagggagtacccgtgctagagtgcagggagtctttttccccggcgcaacgaagctaggataggagaatgcgacgaaaatcggcacttgcgacgaagttgccaacgcagtggatgcaggcggtcgaaagaggaaaggagcaatccgagactgggccgagttagggagcttgctgatgctggattatttagtgccgttcgaggatcactgcaagctgaatgcgagtcgaggagtggataaatttgcggaagatcatgcgacgagagggagaagacctgcgttgtccttatcgtcgtatgagtatagagtttttccttctggtttcaaggaggggaggtaattgaagaagagttggggttgaagggggaaaaagcgaaaataattaaatccatgaatcccaaatccgcaaattgaagctgcggtgggtactgggtacttacgatagacgtagccggcggtatgcgaaatcgtgtaccggatacgtgtattgtccggtaaggataaaatactggtattctgtaacaatccgaagtatgtcgtaatttggatattcgacctctttcttcgttcttctttttctttttctgtgggagagtcaataaatattcaaggacatcggattcaagcggtaactgctgatattccagttgtgatggggataggaggaaaaatgtgtgtatggtctgattagggcaaatgtccaagactcacccagtgtagagatgaaccaatcagtaggaatgaggctgatatctcaaaagaaaaaaaaaagaaaagtaacaaagaattctctagagtgagaaggaggaaaaggagagggcctttgaattgattaaatactacaaccaggtgcaattgctcatccccttcaggcatgcccctacagttaggtactactttaatacccaagtgcctatcaaaatacagagctgcctaccatgagatgacgatgtggaatgattgctaggcggaaacccgttgcttggtgccattggacgatccttggaattcctgaggaatgctatcggccaaactgagccgatctgtgtttcaaatgtgttgccctgaagcgacgggaattacaatttccctacaatcaacctatgacagattctcctggatcttttgtgtgaaaaaggggattccccctttctcttcttcagaactcgtctttcataatcataaatgttccgtgacattatggattatagtggatacaagaatcactagcagtttatttctttcagatttatagtccgaggcaccgccgggctctatttcccccacattgcagcccagttagtcgactagtcgacttttaatataatcactttgaggtttttactctgtatctgttagaccataacaggcattctttacctgtattacttccgaggaaatttccgcttaataccgatagagcggtccggggaagatatgcggagccttcggattgctgcgttttgatctcgagattcaattagactttcctgttctccctgtgatacacggtcttatctagtgttgttgtttccttcaaggttgtgtttgtgttcattgttgactggtcaggccctatctgcacctaagccctgacacaaaaaaagagtgaagtcgatcacgacacatatcaccattttctcctattcaataccttggtgggggttaaaggtacggagtacaaggtatctacatcgccgaaacgtcgaaattaaatctcatccctgaaccggtgaggcttggtgtggcagtgaaaaaaccgtttaggcggtgcagaacgagtggattatccaacgtaaaaacagatcgtcggggagtttgaggtctctgtttttgtcatgaacactacctactccgtgtacgaggcccgcacttcccgcagcgtgattccatgctttcgtattttcagccccccttttttataccttagtctcagatcctccagcttggcttatacctgtcttgtcaagacacacacagttacacagactatacgatgcagagtgtgaccagccgcaatgcataggaacatctgcggggttcaccagcaaccccgcagccgttggaacttggtgagctggcgatgccgtgcttcaccctttccttgattttgcttcacaactctgtgccgctacagccggagaaaagaaaatcgaaatccctcagcacccctccataaaggctactcatgctactctgatcctgggctcctgcacgtcacccgggtgggctgttatggactttagcgttatccaaggacgataaccaacagcccccgacaaggatttggttcagaccttagggatatttcccctatggtaataagataatcgagtatctaggagccccgcgtacgctcacaacgtattcggaacgggcctctccttgtggattttatacgccgcaagatcggaaaaggcgacgggaaggtaaaattacctaaaaggggaaatagtcgtcactttttagttttctttttgctcgtgttgaatttcctttgtttttttttgtgggctgggaatacggtgctggaatgaaatgactcatatgccccagtatacacgcaacttcaaaactacatttttgagccgaatctattgctgaccgtgtctcctgtccaatatctgtgcgctatcgacgtgacatcgtgcagggcggttatggcgggttaaaagaataccctcggttccctgcgacagcacaacagcgaaatagattaaaacttgcagggagatcaaacccagttctgttattattggattatagaaagtagaccgccacgttgtctaagagaccattgcaaaagaccgaagagtcctgtctttgatccatattccattgtgcctcgtcagccctaatatagctaccccacctagtaatgaggtaaaaacaaagagcggtggctgaagcaaggatctgcgcgttcgttacagccactttttccgatgacagcgatgtgataatttctgtcggtcaaaacatcctgaccgctaatcacggtgctttagatgatccataatcaaagttgctagccagtcagcgatctccaccagaatccgactagggggttacagacgggatgaagaggggttgtttagcgaactccatttgcctacattatacatggactcgtgcatatgcacattattgtgaagaaccgtgctatcaggccatgcttgcacgaatgattcccagctctgacgtgagacatgcgacttatactaggctaatagcatgatggaggtgattcagattcagattacatatttttgtgtttcggtaactaggacttggtatgtacataggaaaacatgtcttactatttttgcttccaagatccttggggtcttccattggcttatggaatttgatgtccacttgacagggtcgttctcgtatagagtacaagctagtgtattttatatatgacatcgctcaggggaacgttctgtttctcaatacttccaatggttccttctggaaggtcaaaaatactggtacagtcaatatagtagtaacggtaatcgaacatagagtccacgtcattcttcttcatcttgacggagatacctatctacccgtggacttcttatatcgtcgagactcgagagtaatctgcaagatttgaatggcgtcatactgcctacagaggtattcagcctcctgcactccattttgatgtgcatgtaaacaatacataccagtcaatcttgcatccgctccttgctacgatcaacagccctaaataatgtccccccacttttgacggcgggctctccctatgggacgaaaccttcggcgaaaaaactctcttatgctctttgttccctttgtgattctgtggggagtgcttcgattgccgggattatttttgtaagatcgattggattaataggagaaataaaaaaacttatttctttcatatcaacactaatcttctcgtaaattccagaatatctatttaattggacgacctatactatttcaactcccaatcgttaattagttagtaaccttggaatgattgtggtgacatcatgaagacgcaacgagaaccaaatttctttcgttacggtattacgtgttttgatacgcgtacagtacgtaaaaagtcaggtacatcgaatgttccttgggaccttccgagtttggaaatcccagtatcacattacaacatacaacatacggagtatagcgcaagcttgtcgggatctgagaagctcggccttccaggggcactcgttttttcttgcttaaagaggcaaataaaaggaaaatttgagtactgagctatgggtctgatcttcaggagaacggaaggggctgaacatctccatttccatttctggagaatttaatatatattctccctttctgagtgccattactactatgatataactgtaacatttcaaatgtttagtttgggaaaccgcaatatatattccatctctgtactgtaacactcattcaaaatagagttacctagcacgatttagactactttcaagtattccaataacaatcttacatgctaacattgaattatacagacccagcggaatggaaccgttgcgcctcactggggtccttgctccatcaccttaagcctcgcgtacactttcttccccggttatatcatgcaagctgtgattgacttactcgaaacagccattcttcctctcgagatacctatcaggcatacaaacacccccgggaatacagccccggcgacgggctactcggccggatgtacatcttctttgggttataccaaacttggaagccagtcaaaagaagcaccccgctttgacgcatgcacgtcgacaggcctctaccttcgaaaatgacagtgcatgccagatactatccactagcttacccaaagaagaaagccatcacaggaactgacacgtctcagacatcccccactctcgtccctttcagcccagcctcgtcccgctcctccactccttcgatccgtgttcgatgcttccagtgatatatgcaaatcaagcgaggctgtgttgtacaacataggatcacgtataaccccacactaatacggaaatggaaaaaaataaacatgcaaaggaggccatttcaccatcctcgggcctctctctctttgatacgacaccccgggctacctctcgttggctcagaatcatcgcccccaatcaccgacccggctgttgctagatgctggagattgtctacccctcctggggcatttcgattccgactgcaggaaggcagatgtgtgtctctttccttttttttttttacctttttccgccttcctgccgtgcatgtgactcaacttggaatgaatgttcccatcatatccgaggatattggtgcaacagtatcatagggcgcccgtggttcgcacgtcactgattgtgtaaccataatcatgcattgcgactcgtcccggtcctattcgaaatgatatccttgtttcagaggaaactatcccggaaccggcatggtgccatcactcgtctcacggctgatctgttcgactttcttacgttgtacctttacgacggtgcctttttttttcattgccggtgcggattccggattcaactccatcccatgtctgtatgaggcacggcttacggatttcgtgcacggtgtcgggcgttttgaatgctcgtttcataggcggcgtgcgatcatacgattagggagatcgcatacgtggccatgagtcggataccaagggaagtacacatatgtttcttgaagcttgcaatacttcacgcgacgtatcgtatacctcagacaaagcgggagagcgggagagcgggaaaggaaacatcaagagattgcaacaacccataagcacggagtactccgtagaatccgggacaatgtctcacagtccactcatctttgattacccgtcgtgttggatatcgtggctgaatatctatcgccgacagatattgcggacccatatctcggaatgacacccggctccaagcggctccggctcttagaaaaacaactccccactatactaacctgatctcagtctcgcgattggtgcaagtcgattatggcttggatagcagagacctctgggcagcaggctgacgccattctgaagcagtggtatcagccccagtggggcaagcaagaccaggaaaatatcaccggaaacgccgtcgagccaatgtgccagcttccaaagccagcttagctgctgttagctcaacaaatccgacatcccgcagctacctcaatctaatttatccgaagcactcatttcctctaccagttctaccacacatccccacacatccatccaccaagcaaattcgcattttaccatataccaaacatccgggacacaaagcattcgccagacgtctagcggtttatacatgtcacagatctgagccttcccatatcccagaacctgaaatcttgaaacggaccccacactcagctcctgtgggacaacgtggcttccagaattttcatcgaaggttgtccagcccaccccgggaaatttagtaaaggatcagggtcaaaccccgacatgtcaggatctaattaagatgacttcgaacacgagctgttccttcccttcgccatctttgaggtctattactgacagaatcatgccacgggtcgcccgggagccaatgtcagcgaatttggtccgcaggtcttggcggtttgacattgaacctctagcgctacccgggacgacgacggtggctggcggataggcgtatcgaaacctgttgcagctgtgggtcctttgcgggttctgttgctgtcgcaacgagtagtattatgtcccgtaatatggaattcgtacgggatccctccgtgtacagagtacagtatagggctatagttggtatttggcggtttcttgtgggttttaaatgctgtcgtctattctggggagcagctcggggtagtgtcgaatgaatgtattgcttgcattcagcctcctcttaattttggcgcatgagctacaaagaagtacatacctgtgaaccatggggtcggtcaggtgactttgggtcgacctcttactagaacgaatcattatcttcccccaagctttcagtgctcacgaaatgagtcattccactttagttagctagttaactagttacctaagactcaagagtaagacccgacggtgacagtacctaataaattacaacatgatacatcgctaaattatctgcttgcttcaaagtatgcattgaaatcctttgtaatgcatactgtgggcgacgtcaatcaagtttcataagttacaatataacagatccctggaaggaacgatggagcgttcttgcccgtattggagggaaacgctccttccaatgggtcaagaaacaagtgacgtggagaaggaaggatgttcacggaggacttcctggagtatatacgaccacgatagcgagtagtagcgctatataaagtagtttctcgggcagttccctcgtagaaagcgcacgatggtagataaaccagtattaactcaggcgcttgcagttaggtcataaccccctgcccctaatactcctgatgtacagctgctctatctccgactgggacggtgaaagccgctgaatatttagatgtttatctaggaattgaaatgtcttctgtactgacaacccaatagctccaatcttagcctggagccctccttcttctggggatcgaccaatccacatctctcgtcggttatccccgagatgctcgagggcgttgaacacgcggagggtctcctcgtgctcgaggtacagcgactgcgtagcgccggatacgagcacgggacattttacatcatctaggcgactcgaaccgtccggtcggcggagagtaaatttcatcatctcaaccaaggtatccgtcggtgtcttcaccccgaagaaccagatggccaatccaatttcccaccgggcctggaacgaactggccatggccatggccatcatgctgttgatcagctgcgtggggatccagccattgttccagccgtcgaggagcatcggagagatatggttgcggacgaaatcccacatgtcgtagaagggatcaatagagacgcaggcatggatgcgggggtctgccgccgcgcgtaacgcatagtatccgcccatggaagcgccggccactgccacgtgggagagatttagttccagctcgggatactcttcgacaaaccgctcgaggaagtccaacacccggccgacgaccaattcccagtcgggacgcatggcggtcttatcccgtcggagcatgatcccctgcccaggcccttcgaatgtgagcaccgcgtagcctagattcggcccactggccgcatagacatagtagagctcctcttggatggagtccgccccgcccagactgatcaacagtggtaccgactccttcagtcgcttcgacgcgggcgggagataaaggtatccgggtaggggatacggttcgaaggggatactgaccgcaaacgccgggccgttgcctaatggaagcgcctgcgcaaatgtttcgatcaccttgagggctagagggagtacccgaagatccggcgtatttggcgcatcgtggaacatgtacccgcttgcgcggtagtagttggatgcgcgcaggaatgcccgccgtgccgaaaccctgtccccggtgcgcatggcctcatcgcccagggcccgggctttgtttgcctgtgctagccacgcgcgatgccagctttcggggttgtcgttggcgatatcactggccgccacgaggcattccccgatctcggcgccgccatagggggcggcggagagaatccggataaactcgaagttgaagaaatcggatttaaaaaagcgatgcatttcgactgagagcagggaggattgagcgaaactatcgtccgtctatgttatgtatggtgttgaacttggggacaaaatcgcatgtccgatggtcgaccgactccgaatccgacggaggccagcagcaagccaggcacaggctctatatgagtacatattcgtttttgttcccgtttcttctccgagtgactatacaattaaccactatccccttgatcaagaaacaagcagcaccaaaatgggcgttgaactcgttgcagccgacagtctggccctgaagatcctccgagtgactcccttgatcgccacgacaattctgtaagtgagccaactcagcttcgttttgataaagaggattacccttaacactccaattctttagattggtcaaccgactggcacaatactttgcgctctcctcgtttctccctccttatacctccaccaaaaaggttgaccatgttggcgctgccctacaacactggctccaaacggtggtccctcgaatttggactggagtcatcggtatcgtcttgattgcgcgggtggctcttatcctcaatttgtttgtgcacaccgaagacttagccggcacatatgcgcgattgctctacggcattggcctgttcttctcgtttgcgcacttattcattgcccccacgatgttaaagtttgagacgcgcatgatgagtccagatacgattccggaagtgacattggagctgttggccgggtggctcaagatcaataacgtgcggatttgggtggtggacgtgccgttctgggtggttggagtccttgctacgttggagtcatgcaagatgtagagaatatcaatttagggggggcgtaggaaactggatgtagaggagaagggaacggggtgaagggtttagggaatggacggttgccaattggttgagtgcgcggttcgcgatagagagaacagagtgagaataaacataagcggtcatgtgatataaaagtacacctgaggcagagatcacaacgcagacaccaccttctcttagtgactttttccatttcatacatatcctgcagccatcatgctcctcccattgtcgacaccgttccaaatatgatcctccttgccttgcgctcgatgaactgggcgaaatttcaaaaaaggccccttcttcgcccctgtaacatggtcctgtaatgtgtactcctggcagtactccattccctcggcgggttcaagatcaaaccgccaaatgatgttggaaagagtcaagagaatctccaccagggcgaggccttttccaatacagctccgcgtgccaagagaaaacggcatgaaggcctctcgaaccccaggaggtccgtcttccagccagcgatctggctggaagcaaaacgggtccggatagatcgttgggttgtggtgaatgctgtagactccaacggcaacgtcataccccgccggaatgtgacagccatcgatcatcgacccgccttcctcaacctcgcgccagagagcactccccgcaggaggcgacagccggagagcctcatcgatgcaggcgcgcaggtattgacatgagttcaactgtgtccccgcgtggatctcctccgcagacgcaaaacagctgcggacttcccgggttactcgctcgtacacggagggctctctgctgatatagaaaagtgttgctgccagagtagtggcggtggtatcggaacctgcgtggaaaagaattattcctcgctacgacacgcgttatttttattatgttttctctctcaacacttaccagcgacaatcaacgtagcagcctcgcctccaagttcgtcaatccgcaatgtcttcgcggtgacagtatctttggctgatttgagatatgaaaagacatcccgctcctttagcagggaacttttcttgaccctctctgagaccgtccgtctgatgaacttgataaagcgatttctccaaagaatcgaccgggagaacagcctcttatcgagccggaaaagggtgaggatgggagcctgcagaataacactcactcgaacattcgattcttcaatagcgttaatgatggggcggaacttttcctgccggatggtgtcatagctagcgctgaagaccagggccgacatgatgtcgaaggtgaggtagtcgactttgtgatcaatcagcatgggcaattcattttaggcaggttgacaggactatacaccactttgccatgtcctggcctttactccattttccatcgttactattaagatcgccctggagaataccgcagagcctttgtaccagctcgaggacacgaggctcaaaggaccgaatggctgcgtccgagaagccttgactcatgatccgccttctctgcgcatgtttctttttgtctcggagcgtgagggtgttgggcgcttgatggaccagcgtttcatacactttggacttgcggacccggctcccaatgccgtagatatctatccagcctcagtgacagtttcgcggcgtgacattcgccttgctcaggtaggtacttacccattaccgcttgggctgtattaaatgtcagtcgatccggtgcgtagcggatatgattccctgtgaaagaatcagtttatcttttgacacggacggatttatgaggccctaattgttaccgtatttctgatggcaccgccagatgtccatgtggatgtcacccttccacgcatggtaagccgcatagagattggtgaccctgcccaacagcggtccgggatatctagccaaggggtgaaaggtgagtcgataaagtactagtccaacaatctgatttggtattgtcagtaaagactagataactagaccacgctgaatgtgacatacacagaccagacccccgactactagtagtcccagggttgtcccggcagtgagcacgagttgccaccctacagtattcattagcacaatcacgggaataatcatggtaacgattgaacagagaactgatttacactgcggccgaattgctgcgaaggcttgactatctcttgccttggtggctaactaatagacccgagtccgagtccgactatccgaatggcttccgggactatttacgactaaaatgcagcatatatacatctgaaaaggccccgattcatactggacgcaatctaaagaaaatttagtaacaaaatggtgaccgaatccgagtttcctccgccaccagccaatcttggtacgccgaagacgtgcccgccattctttgcgacttgattctgacattgctagattggaacaacattggcatacagattcgcgagggtaagacacaaccctgtgagatcaagaccacagtgtagacatatcttaacgtactacattacagtcaacggacatgtccaatgtcgatataacgttcaaacgggatgctggagcgagcctgaggtggtcaagggaactgatctgactgtcagcggactgtctcctgcgttaaattatggtaagaattcttctcgagcgagccaaacattgtgaccttccgcgttgactgtggagaataggaatgcaagcctacgaaggcatgaaaggtcagtgcaaatcatacacccgccgccaagttaaactctataacgttatctctaatgctccaatgcagccttccgctatccgaatggacatattcatgtgttcagactcccggatcacagcgctcgtctgcgccattcgtgcgagtttgtctcgattcctcctctgccaacggatcaattttcccgttgcgtgtcgttggctgtgtccatcaatgccgagttcgttcctccgcatgataccagtgcggcactctatatccgacccctagtcttcggctctggaccgcagattaacctcatcttaccagacgagtataccttttgcgtctttgttttgcccgtcacgggcctcctgggagccagggcggtggacgcgctggttttggaagagtttgaccgcacagccccgatgggaacgggatcggccaaggtagggggcaactatgctcccgtcctgaggtggtcgatgcaggcgaagtcacaaggctatggaatcactctgcatctggatagcaaaacccgatccgaaattgacgagttctctgccgcagggtttatcggcgtcaaacagatgggcgaggatgtcacattagtcaccccggatagtccgaatatcatccgaagcatcaccagcgagagctgccttcagctggcacgttcatttggatggaaggttgagctccgacccgtgaaatacgaagagttgtccgaattttcggagatcttggctgtcggtacagcggccgtggtggtgcccattagttcaataacgagaacggctcgtggggagaagtttgtgtatacacctacggtagaagggagctaccagtgtgccacaaagttgtccaaggcaatccaggatatccagagaggtctcgcagaggacgtattctcgtggtgttaccctattatgaggccagaaacctaccattcaagcaaagagatcgatatataggtgcacagcataacatagatggatataggggattgttacgaggaccccccccccccccccccccccctccaccccccctttggggattcaacttaccagccctccacatcccttaacgtcgaagacctacaatttgtatataaaccactaacaaaatcaagtcatttttatgacatcaagtacttcatcgtcaacaattacttcaataactgctccaaaaactgcttcaacaacttcaacaaccgctctatcatcaccaagggatcaaaacatgtaggtatgagatagaacacacgttttttctaatcaaaatgtatttttgactatacaaagtagaattcaaaagtgtagatttaagaattaagtctggcagaattgaattaatgccttctgtgtaaggaagaatcaggcagaagggaggtccttgtaacaatcccctagatgtaaaccaacgtctagcactgtcatcatttcctcctaggctggtcaaaactacgtacaaaacatccaaacagatactgacactatttacacattcagccataggtgaaaacgggaatcgctgtcggagccgtactcacgtccgaccccgatgcttctcccgaatccgaagagggcgaacatgactacacctacaccccttccacatattacaacaaatagaaaatgagctctgcgtggatcataccgtcggcagttaaaacaggaggtttacttgtagctcgaaaatatatctcgtgttattttttgcttgactcactggcggatagataatgcagtgggggtttccagagcaggatgactaagcggctgtgtgacataaagaagcactcccgaggcctaactagatagcaacgcagacacctttccacctctcttctcagtagtcaccccatggtgttctcctctctagcaccctactactcccagtgacgactctgctctcacacctgtttcgcaggcagggctgtcggtgcccctcaggggtcccctcttcaataaatatattctagctcggaacaccggcgaatatgaaagaatgatgaaagagaactatcatactatagtcccatattgtaatgattctgaagaggaattatctctacgttctcaacgcctgatcaaaactcaaaactcatatcgcaaaacgtatcccacgtctcggatgtatggcacatggctcagagcccaggcgacacaccgcaccaagagcggcaactcattcgctccatcctgatccccgaatctcgctatatcacgcaggcgtagacgcggagccaaggcttccagggcctgtggctgatcgagtccccagtacatggatgtccccgtagctttggcgatctggctccggtgctgcaccgcaatcataatcgatccaaccgcatcaaatatcaattgtcccgagggaaaccgttccaccaggcgttgcaataggcctttgccttcctcctcggtgagatacatcaccagcccctctagcaagatcaatgttgggcgatccgcgggtatgtcctgaagccatgcgtcctccatgaccgacgcatcgaccaatcgatagtctccgccgggggtcggtagcagtttacggcggagagcaacaacatcgggaagatccagatcgatccaccgcaccttgggtccccactggagacggagggagcggctgtcgaggccgcatgctagacagataacggtcgccccggtgtcctcgtgacgttcgataaattctgtagtccatcggtcgaacgtgcggctacgcatacagatcgcgctgaactgcatgcggtccatcttgagtttggcaaagtcgtagtcgatctgatccaggattcgccccgcccacaggtcgttgagaatgggttgtggatgctgcgcatccttgaatcggcctaagagcgtgcccagcatggtttcttgcgcgccggtaaggtgtattttcttgttatcggccgacggcgcccggacattgttgtcccgccggcgaatttgcatttggatcctgaacgaaggaaggatgaagttacccataactgtcggggcgggccgctctgcgatgttcttgagatcgtagttcaggaccatgtacgcaatcgccagctttagttcatgcgctacaaagaaacggccgggactgaagtagccagcaatgaggaaatgatttgaattctggagaatgcgtgcaccacttaccaggcgtgtctgccatgaccgaagatgagatgggtttcactggttgtgaccattcccatcttccggtatttctctccttcagcaggatccttgcttccatcgctctgggccgcgtattcttcgataggtcgggaatatcggaatgcatcgtaagactctgggttttcatacaagtcggggtcatggtaaataccattcaagttcagcgtcaaggtacttccgtagggtatatgccatccttcgtccttgtgggtgatgccctcgcgagcaatgaccttatgatccaagagagtgacggcgaaattgctgcgcctttggctctcccgaatggcactatcaattcggtatagtttggcgagacccgccttgctccactgatagttctcctctcggaatacacgatcggcctcctcacgaagggcctcaagcacggagggaccagcggcgaggatatcgatcatggcattctgcgccgtcatagctgtcgtgtgaatcgaggcaacctccaccagcagcgtccgctgagcgattttagacgctttcaactcggttagatcgccttcgagccgagcctgtcgaatgcaccaggtgatgaaatcttccggctcggtccagctattgtaggctggatcaccgttggcttttctctccatatccatgagccgtttttggatcacaggaagggtcattctgatagcccggcgatggtgaaaccagttgggaatcgccaataacgggccgagcagaggatggaggcttcggggtaaaaagtctaataggaagacattccgcaagacgctttcggtgaatccaaccatgctgctcaacagcttcgagttccgccccaggtcttttcccaggaccatccggttcgtaatctgcggaatgagacccagccacatgtcccagatattgagacttttccatttttgcgtatccagcccgaactctcggtcaatggaatcttgaacctcttcctgcatgccaggagtgagttcaccgagggcccggatcaggttcctgccgattgcgcgattgttaaacggatcctggggatgcgcattgcccagaaaattatatcttgcgtaaagcgagtcattgttggcttcgtctgcgctgatcacctcgtccgattgttccagcaaccatcggatctgggattggggcaggaccaccgcagaacgtcgaccaaagccccagggcacaatgaatggccgattgttttttgtgtactggaggaagaagcttagaaagttgtaatagcctttttatgcagtctggtccacataccttctcgtatccctcttctacccaaaccttgtgtcgagcgtaggccaacagaaaattctgtatcgttgctagaaagcccttaccgtatcctacttgaggtagcgagtcggataagacgccttggtcccatttggccacgagtagggtaagtatgaagataccaagtgccccgatgatgtggtttgtagtgatgcctaggacaaaactctccatggcgccaaccatatgtctcgtcgagacatcgacacctaacacggtggagtgaaacgacatcttctcttattttccctttactcgaagatgagaagtggaatccctacttgacactcagtttccagatttctacttgaaggtgtgtctgtcgctggccattcgatctccgtctccgaaccactcggattcggccctccgagcgcacaagagccacctccggcagggaactaactacgcgatattatttcatcgcatagaagatagatttacctgtattcattcgatgtgttcgtcttaatgtcacatcgggtgtgggaactcgcagtcttcgccataacggcgacttataagcatcttctcaacctgttgttatcccctcagtatctcgcttttcccatctatccgtctgcgaataaatccataccagaagcaaccatgaccaccacggccagtacacaggtgcaggaggagtacaagtccctcaccgcagatctcccacccccgccgaggggcgacatcaccacgccggtcctgttttcccatgaatttgaccaaggcaccaatggatacatgttcatcaagaacccaccgccagccggtgtgccgtacaccaacatccgccctgccccctccatagtgacggtggaagacctccgtggcaaggaagacagcgtcaccctcgaccatgactcgctgcagatcctgcagggactgacagacatgccacgcagcccagcggttgactgggactcagacaccagcatcgaaaccaccttctacccggcggtcgaggcggccatcaagaaagcaatctcgaggtcacacaccgtgcacatcttccgccacggcatccggcactcgaagaactggcctgtcccgtacaatccaccggccatgatcgcccatctagaccaaaccggtcccgcggcagtcaaccgagtgctaaggcacatgggcccggtcgacggcccgcgcttgctgcaaggacggtaccggatcgttcatttctggacgcccctcaacggccccgtctatacgtgccccgtggccatcgccagttcggccactgtcaaggatgaggatattcgcatctttattagtcatctcggtggggtcggcggcctgggcatgcccttgggccggcccgtggcaaagccggatcctgccgagcagtaccgcgaagattttggggctccgcggtacgcggaaggacagcgatggttctatttaagtgggatctcacaggacgaggctatgttaatccagatctttgattccaaggcgttgacgaaaggaagtgaagtaaaggggggtcgggcagtccattcggccttccgtgaccccaggacaccacagggtgctcccgatcgttggagcattgaggtctcctgtcttgtttttagtgacgagtgatgcttttcttttggggtttaattccgtgaaggataggtgcaattagttgcagtgcgaagggcatattcatattaggtaacaaagagcttttcatgtttgcattgtttgccagtagcctgtagggtaagaattattgtcggataaaccgtttccgtaaaatataggtccaatcaatggagttcaatcagtctgtatctctgtactggctcaactggcaatttatggagcctgattataaaataaaataaacaataacgtaactaattcacaagcgagtggccatctccaaaacacatattaaatgcaacatattctacatttatatctcaaccgtatgttcatcctatctccccgtttgtcgatagctattgataagacttatatatcaattttgaagagagtagaatactatcttactaccatttcaaaaattacagaaaattacgtccctaaaagctagaaatatatatatcgcagttataaagccattaattttcctaaggctgcctagatatgctagatatcatatctaaagcgctatgctacaaagacaagtccctatagactaccgttgttgagatatcaagttgtaatttattacatttactatgtgttttggagatggccactcgcttgtggtggccgctcgcttgtgaattacgttacacattgttaggattaatagatcctccggtattctctggtatgccgaccctgcgttctccgacaattatacttccattgacaaacatatatatgacattctgctttcacattattagacaaacgaattccataataaatcacttctctcaagtcaatcctcgatcgctatatgacgacaatcattctttcttttctacgaccaaagatgtatccacacccgcttcagaatccttggcattctcagacttgcccttctcgtccagtccgaactcagtgtccaactcttgacgcaaaggaacatccttttccaagagcacaaccagtaaccccaaagctgcaaaggcaatggccacttgccaagtcctcttgatgctatctgacagaactgaaacgaactgcttcagggtttctgacggcaaagtgttacgaaacgcggcggtagcatgctcgtatgcttgtccgccgagaagctcggtacgaactcgctggtctccgatgcgtccgggagcaaggctatcgaagcgattgttcaagacggctgctggaatggccgttccccactgcacacaatgtttggattagtattgagtctcgtttgcagggtctgaggtctcgtaccatcatgccaaaggttcgcaggaatgaccaagttgcagtggccagcgcggtgtcagcttctgtcaatggtgccaggacggcaggaagtaacgtgggaatgactatatggaggggtgagcagaagacaaaaaggggcaaatcgaatggtccatacctagacccgcaccagcagactgtatgatctgaaatcctacccaactgcctgtgttggagcgctcgtctagcagagtcaacagtccgaagccgataatcaccaaagcaaaaccagcaccatggatgaaccgatattgacctagcttcgacatcagggttccccctaggccagcaaacggtactagcgccagaatggtcggcaacaactgaataccagatcgggtggtcgatgaacccaggaccccttggaagtaaacgggtaggaagaagagtgcccagattgtgatgatcccgtgtaggaaggtcagaatgaacgctatcgcggacgtccggttcgaaaagagatggaggggcatcattggatggggagcgagtcgcggcgacgcttcaaacaacatgaagcccactaaacccagcatgccgatgaccaaaggcacaataacgtggtaggacgaccacggatacacggcgccggcccaggagagcgcgataagctatgccaattagccatcaaggccccagcgggaagatcatgaatgaaacaaaatcaaaatcagacgtacaatagcgcttatggtcgccacaaaaagcacgttgcccaaccaatcgatctgcgttagcttatccgcaaaggtcttttcctgattgtacttcacatgaaggaacaggatcaggatcaccaacgccacgccaccaatcggcaggttcagataaaacacccaacgccaggtggtgtgttggacaatgaggccgccgaataaggggcccaaggccgtgccgagcgcaatgacgccgaagatcataccaatgtattgccctcgttgacgtaacgggatcaagtcacagacaatgatctcaatgaggacgttgattcctccggcacccacaccctggatcacgcgtcctgctattagcattgacatattgctcgcgccgccgccgattccgctgcccaagatgaaggtggcggtggaaatgatggtgggccagcgtcgtccgaatacattggccagctgtccctgcagcggttgcaaggcggtcctgatggtgggttggttcgtcagcgcgcctcggacggggaatcagggggtgggcattggtcgcggtacatacatggcaagaaaatagccgttcacggcccagacatagcggtcacctccgcccaaatctgcgatgattgaaggcagtgcggtggaggtgatggtgccctccagggcagtcatcatgcccacaaagcaaatggcgacgaggatggcatagaaacggggccctttcttgaaggtagcggcagcagccgcggacttgggtgggttcgtggggccactgcccggctccccgtcagcatgttggttttggcctggacctgtctgttccggtgtcatctttcttgctgttaagtccctcggggcggatagtgactgtgtgggtggtgaaatggtgagactggcaggtaagagtgacaagattggagcagccctcactcgggggaatggccagggtatccatcatagcgaggcgtgcacattctttgtttgatcgatttcactattccggaacggagtcttgatttctaatctgatgcaggttcggagtcggacatctccagtacattgattcggagagggtgccattggtcactgtcctccacactgctccacattgcccccaaatttcgcgtaagcttctttgtagcttgttcatcgaatcaatttatccccatagtaataataatgacagttgttgagagatcggtgcatgaatttcctctacctattcctatctctcgagacatttactgtcttccttgggaaatatcaacaagttctccggtgagatgggaaggtctcctggtatggggctggtggcacggacccttaggggtaaagtgggtatcacgggagctctccgagacactaggccgaagagagttagatctatttgttattttgtggagatgaaatatgtacacgtttttttccgatcacaatgtagggttttttttgactatgtggagtagaattcaaaagtgtagaattaagtctggcagaactgagttgatgccttatgtgtaaagcagaatcaggcagaggggggtcccattagccaagtggggggatccctgtaacgatcccctttttctcttgtttgaaactgcgtttgctttcttataggcttatacaagttatttcgttaaacgatgagtacaaacaaatggagcatgtaattatatagtttcgaatggctcagccgacacacaccagtttacttttgtgtgccacaagggtcgccaatgcggtcactgaggagctatgcatcacgtcgaaaagagagcactcggcctcgaatgtggccaccagccaattgcgcagctcaaccgccactaatgaatccacaccaaactgcgaaagcgacatgttggggtctatttccgacaccggcctgctaaacatgcctgcgagaatcccgactagggcgtgtgtgatggtctggacggcctcaagcaacgtcgtcgacgcggtaagctgcttcttgatgttgggcccgctaccgtcaggaccggcggagccttccccggaaccggtgaggtcaccgcgctgttctaacccagcaaaacgggtatcatgattccagaatgcagctgaatcagaccgggtaaacgtggatgggatgcctgtgactacctggcatgttgtggatgttcgacggggatcccggatcgcggattcgaccaggcccaggacttcctgttcagacacagctcgcagccccagtttggtgagatggtctgcaactcgctgcgtccctgcgaccacacctacagacgagaccattcccagatcgattgacacagcagataggccctgtgccgcgcgatgtcgggcgagagcatcttgaaagctccccccggcagcgtagttcgcctgtcccgcatttcctccaaagccgctgatcgaggagagaaggacgaagaaatccgcatccagcaacagttcatgaagattccagctgccctggaccttcggacggagggcggccatgtaatcagcccacttcatctgttcaaagatgcagtcctatccagggcggttagcgggagtgaaaaactggaaacatcggtcggtctgttgttggccgttgacttaccttgagaaccatggccgcttggatgacccccttcaccggtagcatgcggcgagcacagtctgcaaaaacagccatcagctgactcttatcggcgatgtcgcagctgtgcagggtaacggtcgtgccatgggcttcaagagagcggacaaacgctttcctagaatgatcgagcgtcgaggcactgcgggagagcaggacgagatgacgggctcctctgtcaactagcatttgggccaccgattttcctatgccaccgaggccaccaacaaccaagtagctcgccttaggggagagaataataggtttgggagcgggcggcaggacctggatgtatgtattagctgtagtttccagagcgacttcgtcctaggacttgtcctaccttgacaatatcgccgggccgtggctgtaaaatgattttgcctatatgtttccccgtttgcatcgtgcggaaggctttctccacctcgcccatggagaacgttgtaatagggctcaccggacggatttgaccggcctcgagcagggtgttgatctcgccaaagatgcgggccacttccggtccacgctgttcccccagagtaatcaagtccagcgaggcaaagagaacactgcggacgaagggccccatctcgaccatactgttctgctcaatgtccttctttccaatttcgatgaaacgaccaaaggtgccaatgcagcgccatgtctggcggagaagagggccggcgagggagttcaacaccacatcgactccctttccgttcgtggcgtgcatgatatgatccacgaaggaatcgtttcgactgctgaatatccgagacggagagatgccgtagtgctcagcgatgaagtctcgcttctcctccgacccaacggtcacaaagatctctgcgccagctgcctgggccagcatgatggccgcttgcccgactccaccggttcccgaatggatgagaacagtctctccgggcttcagatgagccaaatcgtaaagggcatggtaagcggtaataaatacaagcggaactgaagcagccgtggggaaatccatacccacggggataggcgcaacgctggtgtatgggatgcgcacacgggtggcaaagtacccgatgataaaggcgtatacataatccccttccctgaaaccggccgcgcgagcttgaggagtgacatgggcgatgactccgctacattcaaatcccatccggatttcatccaactgacccagggcaaccatgacatcgcggaaattgagtccaaaggctcgtggctcgatttcgacataaccgtcaggtagcggctcattcgccaaaggatcatggccaaattccaggctgctaaggagacccggagtggtcactccgaggcgaactggatggccgatctcaaagaagggcttgagctccggttctctccgcagagagagaccagagacgagctgggtttcgtgcacgttttcgcaaacacgtgaaatgtggactacattggatcgaacagaatattccgtttccagtttgttatggggcgaaagataaaagccgacgtgtaggatacgtgcgaccacatcggccgagtgtgcactccatgccgcagattccggagccaggtccaaggagacatagcgcttggcagtgttctcacatcggagggtccgtaacaaaccctgatggagagcaccccacggctcctccgtaatcgcttgggccccccgagatacccataaggagccctgggagaagcccaacaaatggcgcagggcgttgaactgatcctgagtgagattatggagaagagggctaaccagatcatcgaggaagacacaaacaccactctcaacgttgaccgcctcttccaaggagtgaaccgacaaactgtaggaaccgtgttgatgaagggtggccctgagggactgtacccagctctccggcggtgcagctgtggagtacaccaacatgatctggcgtgatgatggcagttccttcgccacctccggtggaagaattgaagccaaaattacttcacctcgatatgattcggcatcgaggccctgtacaacctgaagggcgcaggggtccaatccagctcgctcgagtgggcccttccacgattcgagggaggcgactcccttccattgcggcatcagcctcaggataacctggattgcagaatcctgaatgctgtgtccaaatatcagacatttgcctcccggcttgagcaaggttcgaacattcttgagaatctgttcaacgtccccagtgatacacagcgcagaggatagaatgattaaatcgtatgtctcaggactaaagccttgatcctctggaaactcgctaggggtgtaggtcttgaagtgaactcgcccatcataatccttcaatgcatcctcatctgttgtagcccgtgcctcttgcagctccagagtcgccatatcgtagtcactgaaacctcggtccgtgcctgctgtcaatgcatctagtatcatacgggtcgtctggaaactgccattgctgatttcaagaatcttggactggggtgacttgtagctgtacagacctagcaggtcctggacaacagagacgcaaaagtcagctggctgagatgaagacctttccagaagttcgaagtgacaatgctcagccacgattcgagcgtccgtttgtccagaaaggatatcaggtaatgctcgagcaaatcgggtgagaagccttccttcctcgacctcttccaggtccgacgccagcgccaggacgtattccgcgctcatgccatcgaggtctagtgtgggccgagcctcgtcgacgacgctcttcatccaagtccaataagcttgattgtctgccgtgacagtctcttctttaatctcgcggagcactgcagaaagaaagacaacggccatctcctggagtcgcgagaatttgagctgtttggcaccgagattagaagcttgggagggacgcagatcggcggcagtgacaaagtccacgtctggtttccagatagcctggtaacagaggttgtcatgcggctcatcaatcgtagctgtcccgcccagtgaccgaaagaataatccctcgatcctcagtaccggctcccgatggggaccgggggtggttgcatcgacgagccggacagaggactcaaatccgtgaggaccggaccggatgagggacgaatgagactcaaaaatgtgtccaggctctgcactcaacgaagacgcaatgtacaatgacttgatagcggtcggaatcagggccgttcgttggtccgttcctccggagggtaggttatggtataccccctggaaaaccgagtccagggtggtcggttgtatgagatggggttgttgatggcggtgcggcatggagtcagccgtatcagccactttgaatgttgagatagagtgcccaggcatcgattgcgcagcgatcaagttctgaaatatcgggccgtgattcacgcctacggcgtgcaatgccttgtatgtatccgccggatcaattgttctccagttcccttgctctgcttgattatcaatccccgaatcgacgaaagccgggccaacccatccacttccgttatgtggtgcgatagttgcacactgaccctcacagtgaatagtccacttgccctgagtatcaaccgactggatctggaagtcataccagccctggacccgaaggactccgtcggccgtggggcgcatggatgtgcgaacctcgactccggcggccgatgtatcgtcgaggatgagcggattgcggatctgaacatcctgcagctggtaccccgatggagttagcgagaattcaccgccaccaagttgacgcagaccctccacgaccatactgatgtagcccgctccgggataaataatggacccctggacgacgtgatctcgcacccagggaacgtcccgaggacgaatgacatagcgccagctgggtgttgaaggggtggaatcggcggcggcaacgcccaatagatcgtggggtgcgaaagtccttgtccgcaggtcacggttcatgcgtggttcagtccagtaggacgtctcgtgattccatggatatgtcggcagatcggtgagcatcggtattccctggtggctgtaagggaaattgaccgccccgagatccaccggatagccttgtttgactaacgacgagaccagacggtgcatggtctgcacggcattctccccccttgtcaagcacgactcgtaagcgattcccgctggctgtagctctgggagctgaagggtctgtcggactggaccggccagagcgccgtgcggcccgacttcgatgagcagatcaaccgcgggcgtgccatcagtctccgccggattaacacagaggttgcgaagggcgtcgagaaactccacaggctgtaccatgtttcgtacccagtgctctggactcgcgatttcttctccggagtacatacgatcgcctgtcgtcggggatgagtaggtaattcccccgtcataaccgggttctggctgcaagaaccgggacaacatttccctatagtcgtcggcaatgggcagcatatggtgagagtgataagccgcttcgacctttaggcggcgagcaaacacctgctcttgcgctagaattgcctctatctcctcaatagcgatcatatcgcccgagatagtcacgctggatgggctgttgacgcacgcaatgacggctttcccagattgaacccgggagagcacggcttgggcattctcgcgacccagaccgacggccaccatcccgcctgcacggtcgagcagcctttgaaactgactggtcagatcgccccggctgtagacgatggccatggcggccgacaggctgatagccccggcggcatatgcagcgccaacctctccgctcgaatggccggtgactccggtggggtgaatgccccaggatcggaggagattgactagggcgatttggaccgcgaccgacagcggcaggctatgggagacttgattgacgcggctctcgttggcatcgcgctgtaactcctcgaccaccgaccagcttgctcccatagagcggaggcattcatccacctccccgatagtctgccaaaagacaggataggcgcttaagagctcccgtcccatggcgtgccactgggcaccttggccagtgaaaatcattcccagccggggagcccgcgaactgcgatggggagacagctgtgtggagtcaagcgtcgactgcagggcggccagcgagtctgcttggcaggccactgtccatgcaaaccgggaccgtcgttgccctagtgtaagtgccagttgatccatgagatggtcatttttcgactcggatcgttctcctgcctctgaaacatattgtcgcagttggtcgaccatggtccgggtcgtctgttggtctttggcgctgagcacgaacactcgagaccgggccttgggattcggggagcatagctctgtcgacggggccaagagaggaaggagatattgtgggtgttcgaggatagcgtgtgcattggcgcctccatagccgaagttattgatcgacgctcgacgtagcgagtgtgagggccatgactgcaggctgagcgggatctatccaaggtatgggatcagtgattggtatccataggcgccacgagtcaaaatggattgctttggcctacctttagtttcaaagtctccagcgagatcttctcgttgggggactcatagttcaaatgcggtgggattttccccttctctaatgccatgaccgccttgataatacctgcaagaccacttgccgcttccgtatggccaatgttcgtcttgaccgatccgatcagaagcgggtgttccccgggtcggccattgccaaagaccgtgcccagtgcatgcgcttcaatggtgtctccagcctgggtcccggtcccgtgggcctcgacataggccgtatcaacggggtttagagccgccacttcatagcattcccgcatgagcgtctgctgtgcctcctggctcggtgacgtcagggtggccgttttcccatcctggttagcggcggtattgcggatcaccgcgcgaatgggatcgccgtcgcggagggccgtctccaggggcttaattaggatggtggccacgccgtccccgcgaccataccccgatgcccgggagtcaaaagcaaagcactttccttccgcggagagaagactaattcttgtcagaaatttctctcttacgttccctccctgttcaagtctgaacgtacctgaggttggttccggaaataaacatatccgggttcaggagaacattcgatccccctacgatggccatgttgctctcgttagctcgcaggctctggcaggctagatgaagtagggtgagagtggtggagcagccggtgtcgatcatgagactggggcctcgtagatcatagaaatgggatacccggtttgcaatcatggccgccccattccctgtcaaatagaagcgcgcaagggtgtctgggtctcgcattaagctgtcgtgattatctcgaaagcaggtccctgcaaacacggccgttcgcgagcccgccacctgttcgaggggaatgccggcattctccaacgcctcgtataccgtttccagttgcattctgacctccgggtccattgcctggtctcgtcagtttgcaagaaaaatgtcagggtggaatggtgcccttacactagccgtttcggaagagaggttgaaaaacgacgcatcaaattgggaggcatcttgggttagaaagtgtgctcctttcacgtacgactatagaaaaaccaaaacagacactcgttagaccacttattgaacccggaatggatatagatggaggtggaaagatgaaataccgtcccgaggtgctccttgtctggatgataccaggccgcctggttgaagcgattcgaaggaatgggggaccaggcactgcgggcgttggcacaaagttcccacagcttttcggggctggtggcatccccaggaaagcggcaggccatgccaatgacggcaatgggcatgacgggcaggtcaagctctggtgcgagggagtgatccgtatcgccatcgctgggactaggagttggagacactgggataatcattgggcgaaccgctggatcgatgagctgtcaaaatggcgatattggttaaatcgctgacctttgcgcacagatccgttcattttaacgttattattataggttgtctcgctggcgagctttccttattgtcagtatacgctgtgtggctctccatcttcggatcggacattgtcatcttgttcggtcggagtcggagaagacaaagaaacagacattggagggttgagggtctggatggatccattaacgctaagcagggactgttgtctcaaacgacaaagaagaggcgtcggaatgactccgttcggtctagggggaagagaggcttactggctagcctatccgggtatgggttcggtgttaccccaatgtttgaattgattaataaattgataaatggcctgtcatccatttagtaagattgggggtcgttattctgtgctctccctcattcttccctgctctaatacctaccgagtatatatttcccttccagacggccttctcttgcgaaatacctcgcgatggccttcaacgcccagaataccactaaccaaggcgatatctcgcaagatgccatcctcgaccacccccccgaggacagtatctccgaactggcctggtcgcctatcgccaaccatctcgccgtatcgtcctgggaccataatgtacggatttacgatgtgacgcgctcggttaagggcgaaggcaaggcgatgttctccttcggcgggcccgtcctgagttgtgcctggtcgcccgacggctccaaggttgtgggcgcgggggccgacgggtcggcgcgtctcgtagatctagcaagcggcaaccccactacagctcaggcccagcaggtggcgcaacatgatgcccccgtgcgcagcgtgcgcatggtccaaattcccaacagtcaggtgccgatcgtcgtcaccgggtcgtgggatcgcaccgtcaagtactgggacctacgccagtccaccccgcttggcgtcctggaatgttccgagcgagtgtatgccatggagatctgccagggccaattgctggtcgccttggccgatcgccagatcagcctcgtcaatctcaaccagcccacttccgtcttcaaaaccctacagagtccgttgaagcatcagacgaggaccatctgctggatccccgacgggtccggctttgcggtcggcagcattgaaggccgatgcggcgtcaactatattgacgacgccaaaaagcagtgagtagctaacccgcacccatataatatccccgatagattaatttccagggagaaagaattgccctgatggagatgtgacccgcagatcaaactttaccttccgatgtcaacgcacccccaaagacaacgaccccaagaaccaactggtttattcggtcaatgcagtatccttccatccgcgctaccacaccttcagcactgccggctccgatggcacctactgtttctgggacaaagacgcccaccatcggctcaagtcgttccctgccgtcggacacagcatcacctctaccgcctttaacctcgacggcagtatcttcgcctatgcgatcggctatgactggagtaaaggctacgcctacaacacgcgcgattatccgactaagatcgccttgcacccggtgtccgacgccgaatgtaagccgaaggcgaccatgaccactcggaggtgacaatcggggtcggaagatagctggataacacaatgtcagaaataatgttccgatgtgttacaacactgcgaaggggcagaacggccaaatgtcaaatgcctgaccaggttcgtggtctgaatatgcctgaatatagactggcagaaatcaaaatacctgaagttatcatgacaacgggcttgataaacaaagcatctaatgttggaagttggaacttagttcaaaaaatgaagttattcctaccatacaaatttccgtatacacccgttttgtacggtcggagatttatggcgtttcaatttatagtacacggtaactatagagcggtgtcgaaagcggtctataattcgggcaaattcaggtataaaccctgaaaaatcgggcagggggcagttcacccaacctgtagcccacccaaggcacgtgactggtaacctatcttatctccaccggttgggtcaacttctataatttggttttaaacctcaccaatacctcaccaataccaactttccaccaatcatttctcgtcaatacctctcatcaaccaccgaggcgaatcagggagaaataacacattaattgcggagcgaagcgaagcaattaaatcataacctcgtgtgcatgtcacgtgaacgttcttttctcctatgggctccaaaatcattagaatcaatgtggtgaagtagtcggctagctttagcagaataatccaaccaatgagctttttttctcatcaaaatgcatgtttttttactatgtaaatcaagattccaaagtgcagaattaagtccggcaaaattaaatcgatgcttgattagtaagattgaatcccgaaaaatcagagaggggggtgtcggattatccaaggagggtgaacaatcccctatttttattagtggtttacatacaaattgtaggtacctactgccggtggagatctcatgtgattccggcgggtcaccggttggaccaaaaaatggcacacaggttgggtgaactatcgtctcgagtgagagctcccaactagaacattggtccattgtctaccgaaaaatggccattttgtctacccgcgccagataaattggcttcaagacgacataagccatacccttcaatactttcgttgatcgaatcctaaaaggtttcttccattctctgtttcgagaggctggcaccggtattttctgatctcgcaacgcacactcttctcgttgcctgctttgcgccgaaagctttctgacgccctgaaccataccccataaataaacaaaaagagcgataaagaagacatcacgttccagcggtaataacgacacgaatctgcatcacagtattgtcgacaaacgaaagtaaatagaaagacagatacgaaaatacaaagcgtaaacctccacggcgcgggttagcagctagtacccgagggttagaaaatgtgtcctataggattggatgtctgtagaacccaaggggttccaatgtgtacgggcgactaagtgtgtgtgcgccccagagggtggtctgatgtgtgctttttctgattcaatccgggggagggaccggaagagattttcacttctatgataaacttcgcaaaattgcgaagagagaaaaggagagttgaaaaatcagaggagaaaggagtgggtggatcttctgccgtcccgagtaactttcgtcggcccgaggccgtcggcccggagcggccggccttggcaatgcttgggcaaactctccagccaactttggactccagatcagtttatactgagctccacttaatttgccaagtctgggcgaaagaatcggcgggccattttgccaaattccaggcatcaaggccccaatctactgaaaacgaccctacgctatgccccttcgtacctggggggtcccagactagtataaggtaaattttttgactagaatgtgaagctcactgctgaaattaacggccagctcaacgtttgagaactttcttggagatgccatacgatgtatcagtcagaatgctctagcgtttaaactcgtgaatagatccgtatcaatagctgcatacaaaaatcaatagaaacaatctctctaccccgattaccacgtcagcaacatagctacccccttagacacccaagaaccttgccgcgtcagccctcccgatgtaagtcgtggacgtgccaccaaccgtgggaacaccactttgacgtcaggtctatccatctgaccaagatactcgaccaacagtgcactgaggcctgcctgctgggcctccttcaaccactcccccatgggtaatgcccgatacgatgcacccgtacccttctccaagtatcgttgtattccatgtagtgggatctgctccccaagatggtgaaggtaccgtacctgattcaagggagagggatcccgaggtgccagaatctcgcgtacaatatcccgagccacctgttccacaggcacaaagtcgagatagccctgccacgaggacttcgcggggagaggaaccgcacgtagtttcctagagaactcgaggagattgtccatcaagtccaagggggatgatccctcgccagtgacgctggaagggcgatgtatccagacggggaagtccgctttccggttcgcctcttcgagcacgcgctcgctggcccacttggaactcaagtatccctgggatccatcggtcggaggtaggacgctggcagcggagacctctgcgaaagtcgaggattgggtgaaattggcgacgccgctggtggaaacgtagtggactggcacctggcgcggccacgccagctggagcaactcgatggtcgaatccacgttggctcgacgaagggccggataattcttgaggaagctgacatcggctccgttgtggatcaccgcgtcagcatcattgaagatcgcggtggcttgggcttctacaagtcccaacctcggcagcgtaagatccccgtagtgcacaataatcttgcctgcggtgaccagaggagggcgccgagtgctcgtaacccggacggcaatgcagtgaacggtggctacggccgggtcttccaccagccgctggaggagagctcgcccgataaatccagtggcaccggtgagcacaatgcagagccctttcagattctctaatcgagttgtaggggccatcggtgttgacagctgaagctggtcgggaagctgaatttcctgctcccaaatgatgggcgctgctgccgttgtagcaacgggaccagcggcaattttcgccgcatcggtcgacgggtcgaggaggagagccatcttctgcaccgtggtcgctccgaatagctgcactagcggaatttccgtgcggaactccactttgatctgccgctgcaactccacgagcagcatggagttgcctccaaccgcgaaaaagtcggactcgggctctagtccatggatggcgataacatccttcgagatgaccgaccgccaaagctcgacaagccgggcttctgttcccgtgagctgcgaggtgagacccaccgattctgcctcggtctgcggaaggcttcgagtgctcaaggccttgcggtcaagcttgccgtgggctgtgactggcatgtcatccacggggagcaccatggacggccacatgtaacgaggcagaggcagagatttgctaagttcccgcaaggattgcttgcgttgctccacaggatatccggcaaggaaaatcacataagcgaccagcagttccgtgttggtattggagcctgtatagagagtgacgacggcctccttaagcatcccttgcgatgattgaaggatcaccgtttcgatatcgcgcaagtcgacgcggtagccgcgcaacttcacctgggtgtccccgttaatccgaccctcgatttgaagttgtccgtctggccggattcgcccgcgatcgccggtgaggtgaacccgtcgccatccttgagccttttgttcggccgtggcgaatcggtcctccatgaagcgactgcgtgatagatcctcgttgttcaagtacccatgcgcgatcccaggaccaccaataagtatctggcctggaataccaacgggaacggggttgagcgcttcgtcgactatgtagatggagtaattcggggccgtgtatccggcgacgaccgacccacggtgcatccactcctgtggactctgggttttgctgcggaggtacggcacttgcagtttgttggaagacatgctggcttcggttgggccgtacccgttgaaaagtcgaagatcccgcttgttcaactcttggaaatcatgaatcatgctcgaagtcatcggctcccctgcactgaccgcagtcctccatttggacttcttgagacccgacaaatcaccgtgcataaaccaactgtgatattcggaaggagtggcccctgcgacggtgataccctccgtaagaatcgattccaccaaggccaccggatcaccacgtttagacagcggggcaatgaaaagcgaagcggcgtttgccaacgccatgaacacctgccataccgaaaagtcaaagctgaaagcaatttgctgcagcaggtgatcgtgcggccagagtcggaactcctcctggtttccttcgacgttgacgcgcaggttctcgtgggtcaatgcaatgcctttgggagcaccagtcgaaccgctagtataaaatatcacggctggatcttccaagacggcacgattgacgacagggatagggaaggacattggtaaatcgtagatgttcattgacagtgcgttcgaacaccccaattcgtccacttgatctttcgtctcattgtccacgagaaggaccataggcttacagtcatcacagatcgatttgagacgtggaatttcgagccgaagatcgagcggaacataagtagctcccactcgcagaatggccagcatagaacagatccagtcggccgttggatgctgaaacacacccacacgttggccacggctgacgttggcgcctaacagagcgaacgcaattgagtcgattcgttgactcatttcctcaaaagtgaatcggttgttgaggccgtctttcaaagcaagtttcttggggaaccgttgcaccatcgtgtcaatacgatgggggagcgttgctggccatcggctgggcactgtcgggcctgtgtaatacaaagacatcgttaatagtggcgagatcaggcttgggggtgcgtgcttaccttggctgagtgcaagggacctttgaacatcctttacagcgaatatagacgcctggcccacgggggtagatggatcattggcaaagactgcgaccatgtttagaaaggcgttcagaagagtctcagctgcttcggtactgtatagggattgctggaggccaagaatgaccaatggctcgccttccactttgtcgacaatatccaaagcaacatcgtaggatgttcgacccatttcataatctagaccttcgaatagacattctccgaactgccgtttctcgcggacatcctgccgataatccatgaaaacttggaacaacgggttatgggatggcgatctcggaaccttgagttcggatagcagaatatcgaatggcacctgtgagtgagctaaagaactgtagaccttcttacgagctgatcgagttaactcaacgaaaggcgtgttggcatcatagtgcaaaggtagggcgagcagattcaagtatggccccacgctgtcagctgcttctacctgaatacggttggcatcagccatgccgatgcagatatcctgggtctcagcgagtcgacagagcagtgcctggaatgctgcaagatagaaatgcgaaggcgtgcatttgacagattggcaaaactggcggatttgtcttcctagacttgggttcaggcgttgttgcactcggtgatgaccatatcgtaacagagcttggcggtcagatacacacgcgaaaggcagtaatggaaagtccgctgggggttcgggaaatctctctctccagaaggccaagtcttcattccacgagccgttatttcgctgctgacgttgtttggccgcgtaatcggggtactgaagtactcgcgtactgagagaacgtccttcgtaggtgttttgcagttcagagagaatcacctccaggctaacaccatccatgttgatatggtggtatccaattatcaggaagtgcaccaggggtgttgccaacaccgcagggcacaacagaagcaccctcattagctgtccatgctcaaggtcgtagatgtgattcttaacctctcgcatagtagcctcaacttcagacattgtgtgataagtcttcctttccagagacaacgttgagtgtggcaggatgatttgcgtaggtgattctccatcctccgcagaaaagcatgttcttagggcttcatgtcgttggcccaccccttgaactgctcgctcaagggcatcaactgaaaaggcgccctggattcgtaatgaacaagtgatattaaaggtagtctgatcctcaaggtataagcggaggaaccagaaacgagattgtgcaaaggagagtggctccttccgtaacgccgagtggacactgtcgcccggctgcttcaggagattggcctggctcgggttatccggaagcggcaaattatgctcatcttcactgaatgaaggcgtttcgatgatgctgaaggacccggatgaagtgtcctcgcctcgggatatatcaacgagactggaggtggtgcttgcccgcgtagatgaactttggccattcgaaagagactttgaggagacagtccgtccaggtccaccgggtcttggccgagcaacagggtccgcagaactagccaacttgggaatactgccaagcttccgttccgaagtccgggattgaatctcagattgctgtctaacaacagcctcaccaacccgcggcacaggagcagctccaatgtttggggtcatctcggtaggaagcctatctaaggcgaagtggagaatgtcgtcaatggtggcacctcccaaaatgcgtagtaccgggatgtcaactttcagttccttcaagaaccaggatctgatttcgacagtgttcaatgaatcgattccaagctcatctgcagctttatcgaggatagaactgctggccacatcatgcaaacccagcataatctggagcttagcaaagaaagattctgccaccaagtcagtatctcgatggtatcccagagtggattcgaacataccttgaacaatcttggagatctcatcagctgttcttgcctcaagaagctgtagtcgaagcggcatctgcctcttggagtcgccatcggtttctgtggacaactcgtcgagaacgactagatgctggaatttcgggctgtatgaccataacggacgctgctcatcaacatctctgataatacgcagcccacatgtgagctccaccgtggcgttggaactaggagacccagcgaggatagcctctgcgaatattgtatggaagtcgccttctgacatccacacatgaccactcttcagaagatttctttgcagcgcctcgctcgtttcacgagtgacatagccgactcccatgatcgctccaatatttatgacagaacctgctagcccgcgctgtttgcggttcgctgctagtgcggtcatgaacatattggcagcggcgtagttggactggccgatattacctgtgacgcaagttgcagaggagaagaaaatcatgaagtctagaggatggatgtgggagaacaactcatccagatgaatgctgccggtcaccttcggtttcaacaccttttgcatagcttcgatgtccatgtccttaaccatggtgtcttgcagcaccatcgctccctgagccactccagcaattgggggaagattccgacagatgcggtcatatactgaccgcagactctctcggtccgtcacgtcgctgtgatctattagcttcgatttccttcgagaagccacgtttcttgctccatagagatagacttacccggcatatacttcaactctagctccagaggttctgagctcctggagaattgtaggatcgatgttggggtttcggctagtcagtaccacgttcatggcgccttgccaaatcaaccattgacaaagggacaaacccagggatcccgtcagaccgacaagccagtatgtcctgtcattgcgcaaaaagggataatggtcaaccctgcgaatcagggaagaaaccgttgaagtggatgtccagtcgatgaaggagaatgcagattggttcagagataggctactgatatcctggagtgggatgaagacctgctctgcttgtctcatggtagcggcatcatggtgtctctccgtggctatcatctgtatagtctcagtagggatgtgctcctctgaacttcgcacggtatcgctgcagaaattagcgagccgctcaaaggtagacgacgagtgcaatgccgagcgaagcttcaacgtcaggctgctgccctcagcgccgggtcgcatgtccaggaccatcaccggctcgttgggcagtaactgttgcaatgatcgtacgtgagtgtgcggatgcacaacaatccaggatggctgcatgtgattcccatctgaggtcaagaagataatgcgtaagcctctctgagaggcatggaatgctagtgccgatgaaacgaccttctcaggctcaatcacgatcagtgctgtatggctgtgggcagacgatacaatggagcgcgcaacagcatgggcggccgcgaacggtagcaacttcgtgggggagtcgtcgctaggaatggtccagctgctgggaatgtcgaccactgaagagttccttgcagcaaaaccaaagactttctcacccgttgcaacaactgtgccggcgaccaaatatagatcattaccgctaagtagacggaccgcctttagagaagatgcctcgacactaattcttttcgagcctgggggagtagcgggagagtcatactcagagccatgttcaacgacataagcccccgcattcccctttaccgtcacaatcttggagcggaggtcgacctcttccgcaattgctcgcctcgatgcattgtaccgcagattttgggcattattgagtaggatacgtggaatgaactccttatctcggatcacagccaattcttgctcggtgctccagagcagcctatttgctcgctcgggattgtctgatatgttcacaccgataaagcgcaggatagctcgtgcaataattagggcagctccagacgaactcaccgagtccaaatctaggaattgggattgaacatggggcatttcaacggtcattgagcgaccaaagccaaggctctgattttggtgaatattcccagcgcgagaatcctcagtcacccaaagaagataagctgatcgttcgtagatgagcttcagaccagccaacgcctctgcggtcatgttcttgaagacaggctcgtctagatccgaaagattcagcgtaaagtatccggaggaagtgggtgctttgctgagatcttgcagacagtctataaccgatacatgatcgaaacgggatttaagatgataaagaatttccttgcgcacgttatgcactgcatctgaggcgccgccaacgactagaatatccgttttggaatctaggaactcaccgctagattccaggggatcgcggaggaactggacagtgggatcgatcgcttgggagacgatggcagacgccgggaatggaagtgcatccgcatctggtgtaatactatcaatcccagaaaaaccagtcttgcgcagtaaccgatcccattcgtccgtggtcacgcaaggggagagtacccggccatcgtcagcaccgagccaccagccgggaaacgatccaaatatatatcctagacgtgactgctccaggttggtgacctctagcatgaccaaataccccccgggtttcagcaggcgtcggatgttattcagggtgtgttccaatctcgaagtcgcatgcaggacaaaggatgcaacaatgacgtcgtaggattcttcatggaacccttgagaagtaatatccttctctgcgtcgaggactttgaagagcatctggccggaatggctagagaacagttccctggcattctcaaagaacccgttggatatatcagtgaatgtatagctagaaaagctacgaccaacggtgctgatgactttcttcgtcgcactaccggtaccagcacctacaagtaatccattaatttagtaaagtctctcgttgacgatcgtgcgggaatgtacgtaccgatttcaaggattctcatgtggggataacgatgcacaatctgagctactacaccagcaaggtaatcactgaagtagccaattcccatggcttcttcatagtatctactcaggaggttgtcctttgtgagatactccaggatggtggattgaccctcgatgactttcgccatgtgttccccaatgatctgcatcacagcaagatcgacattgtcggggaacctaaaaactccttagcaaaagaaaaatatcgtttagtgaaacatgaccgacctttggctttcacgcataattacggcgtgagtatcatggatccagctccgttgagcgtaacggtgccgatcattctcaaccaagccagaaacatgggatgcaaatcgaagcaggccgaggtagggaccctcgtgacgagcttggtgagtggcgggaaatttaagatggagttggcggagatagaatattgacactctttccaggacataggcgagctcatagtcctcgttggtggctttcccagcaaaggtcaccgactctgtatctggcgatgaagggctccagaccattgagctgaaaaatggccgatcactggcagcgctagcagcttcaagaggcacagcatgtatgccttccatgcgggcaagcgtgtgctgaccatccggagagtagatatcaacatcacccaaggtgtcagaagcctccatttgagttaacacagcatcaagctggaaagcagtctgcacaattgggtcatatgagacacacaagcttggattcacagccacccgccggatcaccttgggaacttgaagacaccacaattgcccatcaccggggaagcttttggcaagcaaaacggcctgaatggacgcatctagcatggccgggtgcaaggtcagagaggctgaatcgggggtaggttctcggttgacaaaacctgtcgcgatacccagtttcctcttcatgtcggttagcgctcggaatgggcccgtatagctgtatccgatagggtccagcgagttgtaaaacctttcactaggaacatcaatcatatcgacaagggatggtcgccgcaccggtagcgcatctggagtgggggtgccgtaggtgattatgagacgtcctgaagcgttcatggtcatggcggtcgactcctgcccgacggcagagtagaaggcgaagttggccagcaccgtgtccttctgtttgtggatgatatttgtgatagaaacaagcgtctccacggatgaactttcattgtcgaagatcatcgcctggcggatgactaggtcctccaactcgaccagccgaatagtctcgttgggcgccatattcttcgctgcttccaccgccgaagatacatagccagccccagggaaaaccatctgtccctgaatctgatggcctgagagccaagggacctcacgggggctcaagaaattccgccagcggaattcttgctccactccatccgggcaccgagagcccaggaggggatggactggagtcgatctactcctggtcgccttccatagccgcgattcgtaccagaatatgcgatcatggtcccaagcgtacgaaggcatgtctttgacaatttgcggttgagacccatccgatagtagcgcatcgtacctacacagatccacactggacggcggcagcgtctgccataggtatcctaggcaaccactcatcgcttcgagatcatgggagcctcgctgcaacgtccctgtgtagtccaaggacgcgtcaagcaagtcttgtattatctgcaaagttgggccacgcagggcaggatgaggtcccacttcaattgctaaagtaaacgggccatggccagcggtggcgctttcaaccgcttgagcaaagaggactgggtggaccatgttatcgctccagtatgtgtctgcaagatcgagcgctcctgcgactgttatgttcccttcccgcacgctggagtaccagacgggggctgagggtggcggatggccgattttgatattcaagtttttcaaggaggaaatatattgatcggagcaggctctcatgtggtgggagtgataggccttgtccacggccaatatgcgaacgaactttttctcttcatcaaaaacggctttggcttgctcaattgcttcggcatcaccggacagtgtgacactggccgaggaattgactgcggccaccgaaatccgtccgtggaactcaggctccttgcagagctcaagagcatcttcaagggaggttccgacggccatcatggctcctttctgtccatcggggcctcgagccgaccgagagcacaacccacgatagtaggctatacagatggcatcgtctgcggagaaaaacccggctgcataggccgcagcaatctccccggaggagtggccaactaccgaatccaaggtgacaccagcaccacgcagcagctgcactaggataatttgcaccgccgtgcacattggctgggagatctcggcctccttgatgcgcgacgccaacgcatcggtcataaactccttcaacaaagtccatctcgggcggtcgttgcttggaagacgttggagagcaagatccaagccctgcacaatctctcggaccttggccgacttcagtaactcgcgtcccatcgtggcccactgggcaccttggcctgtgaagactccgagtactcgagggttctccgtttgagactggtggtgtctcacagcgaggggggctttagcgtctgtttcctcaaggcgggcttgaatgttggccagtaggcgttctgtcgttgcaccagcgacaatcgtggagaaagcgagacgagatctgcgcgagtacagcgtccaggaaacatctcggatattcaccgcggggttttcctggagatattccgcgaacgatgtcaaatttcgggtgagagaggcctcagaagtggcagagaggatgaatggcgtgaagttgacctgatctcgatcccgcgggacgacaggacgctcatatgcctccaagattgcatgcgcattggttcctccaaagccgaaactgtttacactcgcccggcgcggtacacccgacggcagtactggccagggcttcgccgttgtagttatctccaggttggtgtaaaagggttcgatcttggggttgagttgattgaaaagaagattcgggggaatagtgcgattttgaagagctaatgatgccttcaacacaccggctagacctgccgttccttctgtgtggccgaccactgtcttgatagaaccgacgtagagtcgatcattttcttctcctcttgcaggaaaaaaagcattgctaatggcggctgcctccagggggtcgcccgtcggtgtccccgttcctgataatgttcattagccgggatgattcgacagcttatccgtatccttaagagcaaaacttaccatgcgcttcaaagaattggcagcggtcttctttcttttggggatctagtcccacgttggcgtaagtggcacggatcaatgctgtctgtgccgtagagctgggcatagtaatgccattggtgcgaccatcttggttcacgcccgtctccttaataagacactcaatgtgatcgccatcttccaaagcagcactcaaggttttgagcactacaacggcgacaccttctccacgagcatatccatccgccttggcatcccacatacgacttcttccggttggggaaagcatttgaagtttactctccgcaatatacggctctggcactagacagaggtttgacccagcagctacagcaaccctagagcggccggcacgaagtgtttgcacagcttcatggaccgctaccagactagacgaacatgccgtgtcaatcgtcatagacggcccatgccagtcaaagaaataagagatccggttcgagatgatgcttcgagcggttccggtggaagtgtacatggggaaggattcaggatcccggccgatcatatcggcatagtccccccacatcaacccgacatagactgctgtttctgaaccccggaggtcctccagccgcaaaccagcggagtcaaccgattcatagactgtctcgaggagtaggcgatgctgagggtcaatacaattggcttcggcaggcttgattccaaaaaattgcgcgtcaaaaacacggtagtcctcctccagtaggtaggaatggcgaacattgctggtgccatgatgaagattgtctgggtggtagaagccatcaggattgaaacggttgggtggaatttcggtctgtaggtcttttggctcccgtagcagctcccagagctttgacggcgaattgctctgcccagggaatctgcagccactgccaacgatggctatcggctcaggaaggctgcacagtggtggcatggtctcgcaagggcagtgcagtgatgcgggatgtttgagaactggcgatgataaccgtccgacaatgatcttgagaggttttccattattactcctttcatggtgggttttgttgactctatcccagagctatccggcatgtgctcggaggatgtattcggagtgggcccccgagtagtcggtcatttggcgtcggaggtcgcgttaggctgggagttgattcgctaggtggtcgacgatgtggggctaaccgatatacggagtactccgtacggagtagtgtatgcttgaattctcagtccgtatatagtcccaaagaccagagaacactaatctatagctgccatttcgatcaaagcaagaaggggtcgagcaactcccagtttttgtgtatgaacgcatatcaatcaagcccaatggatggcagtatacaacataggaacctagttcaaggggcaaagtagatggaatggaatagcttcaatattacccgcgaccttcgtacacgggcgatttgaacggtcggtataacttcaatgctggatatggtcaaggcctaaaaagtaccgtttgggggtgggaatagcttgaaattcatggatgggtggtattgtgcggtatcgaaggcggtctaaaattggtgagctagtcccaattaagctataaaaccattaaaatctgacatccaaatctcgatataacgacatttgtatgaggagaagagtgaattaacgaactgtgtaataagaagggaaattcgttataggcttttactgtatactgaagagggatattcacgatggacaatctggcctagcagacaagacgagagcgacacaacaacaccaactatccaatgagatcagctagcacatacagaccgtatgtagtagacatccttctatcctaattcaactacatcctgtgaaccccttttcattctgtgtgtggtgcataatctatcttctctccgctgggattttatctgacatgagagctccaagattttctctctgtctgaaaagcaaggccaatagttgatgattccgggtttccccactgcgataactaatttaaacaagaaactgaccgttacaaatatgacatgtttttactttatttcctccattgaaattgtctttcctaaccagtgaaaaaaaactcatggtccaaagacaagcgcagaggtctcaatactccagcgatctggggcgttcggcggcgtccgaggatccttgaaagcgacatggaccgcgcgccctcccttgaccccactgcctggtttcgatccatacgagtcgaagatctgtaacatgatcgcctcgtcagcccctactccggagagatagtaccacttctgatggtctcgatagatgggagcgccaaaatcttccgagaaatccttgagatgggagaccatggtgacaatgtcttcgtccttgacggtggcactcgatgcaatcgcgagcggacaggtgtagacggtgccgtttaggggctgccagaagtgtatcacacggtagcggcccagcagcagcttttcggcctcttcctcgtccaggtgatatctcacgcgatcgaccaccgcatcccccgtatggtccagatgggcaatcaatgcgggcggattataaggcacggggaagttcttcgtgtggcggatcccatggcggaagatgtgcaccttggtggcaccggggacgttggccagaatctgctgttctactagtggatagtagttcttccggatgtcctcctcgttgtcgaaattggtcttggagatggggacgccctgaacaatatggatggaatcgtggtcgagattgacagaggactccttgccgcgcaggtcttgaacagtcaccatgctcggttcgccgcgaatgttggtataagggactccctctggagggggacacttgatgtacatataaggtgtttcatcgggagggaactgccggctaaataaaagcggagtggtgatgtctcctcgagggggtggtggtagagcaccttgattctgcgcggagactgggggtgtcttagtggtagtcatactatggaccgttgcgtctttccaaagatcgttgccagtaccggaagccttgaatagatctgcggggagtgtctggtgagaaatatatggagtatattttccaggatcggctctgctactgctactccacaagcactatttccagcaaacttcctgaactcgtcggagtcggaatggagtcggacagtcggggttgatggccgatctgaaatcatggctgattttctccctcccagttgaatagccagtctaacaattagttagaacgaattttgcaatatctaccgatgactataccatagattagtatactattatgactatcctattaacatattatatagtaacactatcaattattatggaaaaagaacgggggaataatgtatgtatattcacggctaaagatcggttacttcaactaagtcttcagtggctctgctagttacaatgtttcgcttagaaatcttcagccacacgttcggctgtttggtgatatcgtcgaattccgataccagtggcatcttccagtccgcattcgcgatttctaagttgtagcgcattaccattgcggccaccattccaatcatctgcttctcggcaaatacccgccccggacagtaggttgtaccacctccgaacggcttcgtcgtccgggcatggctttcgccttctccgcccaacgacttctccaagaaccggcgcgcgtggaaggactcggcatccgggtgcagggcctcattgaagtgcatgagaccacatgggatgttgataaccccgcctttctgcacgaaccatttcttcttgccggtgaactgggtatcggcgacgacctcacgcaccgtcagtgagttgttgtgcatgcggagggtttcgtgccagatggagcgcagcagcggcatttttgtcggcaggatctccagcagttccgcagggctgcggtcggaagaatattgcgcgtcggcgagttccttgcggacctcgtcggccaggcccggctcagccagaatatggaggagggcgagataccccgtgggcatagagttgaggagcgaggcaaacatggtccgcagcatatcggcgccttggcactgaggactcatcccggactgggtcaggtagaccgtccgctcgtagagatactgcgagacgtccttgcgtgtttcgatattctccactaggtcggcgtaggtgttgatgatgcggtcccgagcctcgtaggcgtcgcggtagaggaaccgcggcgcgcggaagagcaagccccagaagccgtcgcgcaccatggtagtcaagtcgtccagcaggcccggatgtttttgcaaggtggttgcaccgtacagaacctgcacagtggccttgccctggacgtcgaccacggtctttagaccgggccgcgtgatggtcttcttgggcgctgcgtcgatttcggcgtccaggttccgaagctgctcctcgatccgctgcaaatactgcatcgcgataatgtcgttcttgtccgagagcagccactctaggtccatgcgatgccattcaggcttaatattccacatctggtcggcatccgccgctttgaatccccagatggagatgtagataaaccgaacaaagccgcggatgcttaacgtcttgccgttcttatgaattcccgcaatgtccaccgggtcgctgaatatatagtgtctccgaccccccataggtacactaaaagcttggccttcgaccttgcgactaaagcaatgttgtaagtgggtgttcagcggattggtatctccaacgaagtcatgacaatcgacttacttggcccagcggaagaattcccgcttactttttgcaaaccgaaacgcatgcccaaagaatggcatccagtgcggtatcacttctggctcattgggcagttgctttggcgtgaaagctagcttactgagaatgagaagggcgaccacaccggccgctgccagcacagtagggctgagcatggtgaatgaatttgtataaactttggtttctttttttcgtcgattaaaatatgctgccaatcgtgctattattgttttagggtcggaagagagggcaggattcggacacacacttgctcactctcggaggggatatccgaacatctctccgacaccgatgctgtctgtacatatcaccggacgagaaagacagtcaatgaacaaaggaaaggaaagaattgcaacgacggtggacaggcacaatgctgtcccaatttcgtattaatggcttgagggatggtttatatatggagataacgtcctggactacactcggactgctgttggcatccgtaagtatcataatccggttccatagaagcagtggggggtatgatagctgaaagttagagcggcagataattttcgcgttcaacgtggtccgcactgtctatcgactctggtttcatcctctgtcccggtatccagggcccaagttggccgcggcaactcatctgtggtatgcctaccattggatgggaggaagatatccgttcagtattgaagaggctcaccagaaatatggtctggctcctcggattccatcttctaggttgctgaagcagactgactgactgatcattctaggagacgttgttcggatcgctccaaatgagctgtcattcagcacggcacagagtttccaaggtccgatcaaccaacaaggaaatagataatcgagcaatggacttactgacaggagtgaatatcagatatatatggtcatgccacgtcaaaggaccacaacacattcatcaaaggcaccttctacgagcacccccaaccagaaccgggcatcgtggcggagcgtgaccccgaaaagcaccgggaaacccgcaagctattgtcacatggattcagtgcacgggctcttaagacacaggagtccatcatccatgattatacaaacctctttgtatctcagctgaagaagcacggcaccgaaaatgctttgaacatgcgggaagtaagaggaacccccgatttcttgcgctctaccatttcagacagggtctaatcatggatagtggttcaattatttgagttttgatatcattggcgaacttgccttcgcggaaccttttggagctgtcaagtctggtgaggagcagaaatatattcctcttttgcctacctacaatgccaactaacgccactagccaaatcgcatttctggattgataccatccatgatgcaggcatcctggtttgtttgtttgagattgggcgtcgccttccgcttctatggcccgttcttctgttcgctctgccggccaatatcaaaaagaaattcgacctgttcctcgaatactcgcgggatctggtccgtgctcgggtcgcccgcaaagatacggtaacgcgggaggatttctttgctcggctgctggcggacaaatcggagaataaatctgaagagtggttgatggcacaggccaatgtgctagtcattgccggctcggacacgactgccacggccctggccaccatcacgtactatctggctgcgaaccaagacaaactgtggcatctccagcaggagattcgccgcacctttgaagattcgtcctccattaccagcgactcacttcagggtctgccgtatctcaatgctatcatcgaagaaggactgcgcatctgcccgccgacctcctttgggctaccccggattagccccggtgcattggtagacgggcatatggtacccgccggtgtaagttccatctccattccagatctttatatgcgagggattgttctaaccagccgccaaccagacaacggtgtcgactgcgtcctggaccaccgcccaccgcgaggactacttccgcaatgcacgggactttcatccggaacgctggctcgctaccacgcagccactagcagatgtccgattcaaggaagataaccagacggcgtcgcggccattttcgctgggggcacgaggctgtctcggcgtaaacttggcgtacatggaaacccgaatgacgctggccaagctagcatggcattttgatatggacttggtgaatcaatccagcctggattgggagagagacttgagatttgaagggttttggaaattgcccacacccgaggtgcgattcatcccagtggagaggtgagaagcgtctagtttatacaagagcggtgtcgaaagcggtatagattaaggcaccctaaggcatcctcagacatattaaggcatcaaccctcccaaataattcaaattgacccctgagcgctatacaccttcgcataggatggcgactagacagtagttttgaagatcatatatagaacttgtactaggtatagatatgccttgctcatctacatactcacatcccatctccccaaaacttttgctcggaattgatagtaccactcgcagacgatcacatacagtttcggcaccgtcaatgactcgacatccacatgttcaatgaaaaaaacgccctcgtacggctcctcgccgtcctctccccctttgacccgcccaacatacgcactgcctcccgccccgccaccaaggtcgaatgcaaactcctggttacgatactccaaagtgaacgaccacttcttccccactgacggcgagatcagctcgatctcgtaccctaccggatcatgcatacttcccccgtccctcggggctggagcagaccggtagagaatgtggttgtccgtctcggagaccgaattgcgttgcgcagaaaatacattgaccccgtgcttggtcagaaagggcgacggatacgagacgccatttaaccgggaggttggctgccaaaagctcagagagtatggcccagctgtgagtcggacggcttcccattttgtcaggatttctagccatccttttcccgaccaccagcggtcatggccccccaagccggtccatcggaacgcacttccctgaatagtcaggtcaacttcgatcccgccggctggtatgggttcgccccagtggagcattggcgcattccaggtcgatgcgaccttgtccgaaacgagtgcgccattcggatacctggacggggtggtggagtgaatagcaaaggagccggttacttccttagtgtggatgtggactctggcgtgcttggaatcccgcgtcgcctggaagacgtaatactcgtctatggcgctggcccagatcccgaccacctggttctcacagacatgcacgacggaccgggcgaggtaatcgaccgtggagaaggtggtcccgttgtcccagaccacgtcgagcgacactcgaaagttgccggggccaaggaatgcataagatgcatcacggtagatgccaagcagcagcccgctgcgaccggatgccgacgtcccatcaaaggcccattgctcaccggcggtccggttgagagcggagaattttggtgcatcgaacgggtccaatggggaggtggataagaggatggacggattagccgtctcgaatgccgtcagatggctggtttgacatgtagtgggcagatcaagctgttgttcgatcgtttggatatatttcccctcatcgccgacgtttttgaggtcgaattcccgtgccagtaaaaaggcaagaagaagaacgggcaacgtgatggacagaaattccaacctgattctcgccatcctgatggtaatgactatgattctcaatggccggtcaacaggcaatacaaatcataatatcgttgttgacgcccaggtgaggtctagattggtggttttcgctgagccgaatcctcgccgaacgccctcccgaggccgacaatccgagtccgaccttgcgcagatgaacacaaagacgaatgtctacatgtattattatggtaattgtcatgtctgtcatttctcctgatggagagattccgagagtgagagttcgacgttccggtctattccagacacactgcaacaatgactcgtcttcaccaacaccgtctgccgaccggattctcgccagaatgggtctccttgccagcccatcagacggtcatagcacagggcgatcaagggatacccgtcatctgtgatgatgccccaatccctactccagaagcacacatggtgctggtgagaacgggcgcggtgtccatcaacccgtgcgactggaagatgtcatctcgatttcccagtcctggcgctcgcattggctgtgatttttctggagtcgtgctatccatcggccccgacgcagccaagctaaggcccgatcttcaggtgggtgatcgtgtttgtggaggtgtgcatggttccaacccgatcgatctgccatccggtacctttgccgagtacatcgtcgcccatgccgatctactcttaaagcttcctgaacggatctccttcgcgcagggagcggtactcggtgggagtgtctttgcgacgctctggatagcattttatgactccctggggctcacgggcactccggacgcgccgattgaaggcgacgtaccgcccctgctagtgtatggaggtagcacctccaccggtacagccgccttgcagcttcttcgcgcgtatgtatccattccatggggggaagccacaggtttcgacgcgatggactgaccttccgatccagatccggatacaaacccatcacgacatgttccccgcacagctatgccttggtcaaggagtacggcgcagaagaatcgtttgattatcattccgagacctgtgctgtggatatcaaagcctacacaaaaggccgactgcgtcatgttctcgacatcatcacggatgtgccctcgcagctgatctgctacgagacctttggccgcgtcggaggaaaatacacctgcttggagaagccctccgaagagctccatctgcggccgacggtgaaaaaagaaatgattgtaggattggctgctagtggcaaagaaatcgcactagcggatggctacgaacgaccggcgaatcctcgcctccgagccgaaagtgctcatttcttccaatccgtccaacgtctgttggatcaaggacgcttcaagccccatcctgtccggcttctgccaggtcgatttgcgggtattctcgaggggctagaaattctccggtccaaaaagacatccggggaaaagttggtcgtgctcatcaacgattcttatacttaggttggaatatcatcgcaatatatattcttattattatagaaaatttctatgccccacttccgcttataaatccgcaaaatcaaaattcccaagtgttccccagcttgaggttgatcgctctcacaatttgagcgagggactttttcatgtttcccacatcaccaccaccgcccgcctcgggcacatctaacacaatatcaaatagtctccgcgtaaggccgccgtgcatatcgagccggatcgcacacatacactcatcaatttgtctaataagatgcgcgctcgcctggagcaggatccggatctgaagatcccgtcgttgcgcaacatccaacccgtcgatgtggatgctgggcagcgtgggaaggaagttggattccaccatggtggctgtctccgcaatagagtcccgtatcagcgagaagacttcccggtagacgcgcagaaggctgatataacaggtcagcatgagcatggtcaggatcggatccacggtctcggactcgtctgaagaacgcttggacggatgactagacgcggtgggagaagttggagcaggagccggggagccgtcactcgtgttacgcgaactcggcgtcggcgcatgccgatccgtcagggaggccggcgagaggcctcggttagtttctcgtgaaggttggtctgtcccacttcggctgcggggtcgcgagagtttaaactctcggagggtgcggagcagctcttcggagctgttgagcatatgttcaatcagatactggtgtgatccggtctcgctagtattcatggtcgtctgctggcgagtggtagcgaagagaagtgtgccggccacttttccagagtcaagaagagtcaagtcttggagaagacccgcactgatatccgacagtctttcgttccagttctcgttgggctttggggcacagtttatccggccctggttgttggatttacgccggcgcgaacagggtagagagtgataggcgcttactggggggactgcctcctcgcgcaatggcagaggggcgggatcatggctgtccagtccgagagtcgtcgtcgggttgtttctttcttcctgctcgtcattgttctgcgcccaggaagcgtccgcgtcgataaaggcctgggtgaagtctagtaaatccgagcctggaaagcccgagatggcggcatccatcgagatatcgccgtacgtctggtattcggggtcggagattggacgctcggggctggtatctgtgccgagatggggtagctgggagtccgagtcgaggattaagatagggcttggtgatactgtggccattcgatggtcggggccaaagacggatgaactcatgcggttgggcctgttcgaaggtagcgaggcgttggccattgagggtctcgctttggtgatgcggtgggaaaatgttgtcacacagcgggcgccgaccttgaggcaccgacggcaagagtcctcgatgctcgaattgggtgagagacgctcacaacgcagcttctgacctcgacagcggtcacaagcagatcgacgaggctgttcgacttgtggggattcgtggcgggtgctatccatactggacagtctatcaacgatattctgcgtgccagcaaatgtctccctagacgtatctttatttctcgttttcttcagtactttttccctcttttacaactttctctttactccactttaccacggttactgttcgccgcccactatcagcagggcgatttagggtcacctatcggatcgggcttcatgaacactctatgccaaaagaagtatatgaactagctatcttccaggtctagttgcgcgtgagaaaataggccgtgcatctcaaagagccacgctagcatacttactcgtagcgaaatttaacatgctagccagtcacattatactatgaatttctggtgcctccagccccacttaaactacccctcaatgaagctgagacataagctacagatccctataggcgaataagataatagactatagcgggatgcagaggtctactaaaagaacgagtctcatgcggccggaatagcctatggctccgcttcaccgggttagccgcaataccgagcttacttacattcactagtccatacaaaatgagtcataagaccctgtctaactcttagttatccgtgtctctatgttatttgccagtcgttacgagagcggaaggtgtattcgaacggagtaatcagtacaatgagaagaaaagaaaagaaaagaaagaaaaactagcggatggtctcgattgcatgggttttaactttgtgggcgttcttaccaagccatgcagatgagtgcgccagtacggaggatgggaggaatggttccctccaagactgtccagatcgtcatctatcgttatcatttaacaattcaacccgctgcaactgacccactatatataactcgggataatcgtacataccacgtcaacgcagatgtgatagagcaaatcacgttctctattacttagatcagattcggccccatggggcaggtcccactttgttctggatgtcgcccggtatggggccgcgggccggcccctaatattctgccgggaagattggtcagtcaaccattaggaactaattcatatgctgttccgcggccgtaactaactaatgagtatacaacaattttcattttctctaatcatttacttttctacagccgcatttagttcaatttctagcgactttataaatttcaaactaaatgtaaccacaagctgacaggcaagcacggagtaagcaagtacagtggtgttccatgagtatttgaccttgggtacttcggccttgggcccacttcgtaggcccacttttaatattgcccagcagaaacctcggaaattcaatccaatttaatagctggtatgccaaccttcatatttgttggacatggtggtcacctgaacatcagccctgttcgggattgacaaccccatttcggggtttgggtcccgcccacgggtctagaaagggtacttcaagaaatacatacaggatatctcgaccacatcattcaattttaggaaggtaaactaatatcgcgaagttaatctaaaggcagttgggccgtacattcggccgagttactaaagaaggaagtaagcaagtcagtaagcccgggctctaatgaggtacaacaacccaaaaggtttgttgaatgggagaaaagggccaggttagtagactacctacattaggtcctatattttgtgttttttttttaatcgtgaactctgcagttttccgtttatcggatttgtggctttcaccgaatttgaaagaggtgtctgattgaaatatataccgcctcaatgggtggtgattgtaattttatatataactcaattgtgacgatccggtcaacaaaggaaagagcaggacttgatcacagctgctatgtatggaaggaatctttccttcccaaatagaagcaagcgtaagcgattcagatgtccatttgcatgggacgtccgcataagactatacaacaggctgtcctttctctgctctgtactcaacatctcgtctgaatgcaccttacatctctgtaaagtctggcctgtgacatcaatgacaaaacccgcaattttaataagatgcttgtaatagaatatacttcgtttcgggtaacttccgaaccacggagtaatcaccgcctacaggctactccgaacatcccgtgtgtaacattacagcctcttcttctctaacaattgtcattcaattgcacgaacagcccatcgtccttatgacaagtacggagtacataacgcctgatcgccacttattaccgccttcttaaggctaaagttagttacctagttacaatttagtcattctcattcatatttcaccacatgttggggtgggttaaatgaagcctttggcgccataaatttagggacttgttgcatgcctagatttctagtatcgccttcctgatcgggtacttctggtttacatagtatgaattttgattaaaaaaattctatattctacctgattcctataggattcaaccccttggttggtgaaacagttgatacaagatatgacaggagtgacttatttttgttaagggtttacacacaaactgtaggtacctgctgtcttgctactatcacatgcagtttattactgtcagaatctaggataaatactgtcatttttcatccctgatacagttaggtcacatgactgaccaggctggtttttctgcagaaaaaccaactcagatggtttttcgcccgaaaaatatcctttcattttgttttgtttgttttgattactaagttgtccatcagattgtcatgttttaggactattgtcagttttagagagttagagaatttattaagatttttctgccacaaaatacactcgccttaccaccgtttttccgtcaaatacaaaagggtgtacagattaagacgcggcgaggagagcggtaggcagaagcaagtgaggcaggtgctcaacccaattgggaaggcggtactgaaaattcacgcaatgcgagcaacaattccctaattatcatttttccagatggtttactagctctgtctgtcatatatgaacatgaaggaacgccgttgcaggccctcctgataggcggggaggaggggaaattaaaatcgaacaggatacattctacactcccacgaggaaggctcttcccaatcgctgcacatcagctctcaacaacccttgacggtgacattccgccccaaacaagtcttcaatctcagaccataaatcgagcatcaagaccttgttgtctaacatccgctccagacagcgaagcactaagcttttgaccacatcaatgattgtggtgggcaaggcatcggtgtcatactcatatcgaattcttaacgcaatcatcggcctgccattcgaagagacatgagaacttcgagccttctgtggaaatttgaactggctttacccccttgacaggaaagggattttcgacgttaccatgtgtccgttggtcgtggaaagtgaccacgcaatcgaataaaggttgttgttgtctttgcctaagaatttgatggcttgggaatggtagtcctaggtgattcagcagcgaagaccagggaatggcatttgccagcgcagactgagatgacgatcgaacttcttcaagagcgttctcagttgtagaatccgctttttctagcagtattctaactggcaaaggctgaagaaacaagccgaccacttccatatcccttgtgttagatcggttcatgtatggagacccgaggagtacatcatgtcggccacagatagtctgaagaacgatacccactactgccaagccaaattgatgcagtgtgattcctttgagggaagaggtagcgagaaggcttttgtataatggaggcggaatcgtctggaacacggattctccgtggtaggatctgcacgatggatcctcagttggagaatctggagcccgaccgtctgtgataggaaggcccttcagataggtactccaaaaggacaatctatcactgccaacgggttggttccagactgtgcagtcgaagtactcgcgcctgacgggctccaattttcgaccgtagtatacagcagcagtttcgcgcaagatcacattgaatgaagtcaagtcacacacaacatgcgaggcgcaaatgacgaactgattttgggaaaccacggcgcggatcgggctttctttgtcaagattgaagggagtgttgatataatgtccgacgtcaactttccgtacgacaggcacgatgattgactcgcctgtgattgaacgaagcgtcttatccccccggcttgtaaacctggaacgcaaaattcgatggcgattaaacactatctggaatgcagaagccagcttttggatgtcaacatcagtcgagagctccgcaaagtaaggtacattgaagctcgttgttgtctctgaatgttggtaacgatgtatccactcgatctctgtcgatgaaggagtttctagaccaagtggctggacttgagcttctggtgatgccagtggtgtgccatgtacctgtgactcgccctgagtctgaataagacgggctagatctcggagcgttgatgcggagataatatctttgacggtaattgggatgttgaaaaggctcttgatgcgagcagctagagcaagttggaggagagaatgaccaccgaggacggcaaaatcatctgcgcttgatatttgcctcttggagtccaacgtcaacaattgtctccagatgcctgcaagtgtctcttctagagaattcaggggctgacttgacttgggaaccagtttgacgtgattgttcgagacaagacccttgatatcaaatttaccatttttggttaggggcagctttgtcatggagtaaacgcttttcggggccgaatgaggtggcagtgccacggccagctggcgtctcagtagctctgtatcgatttctggctcaacccagagcacaacagcgccgttctctgtgactgcgacggctttggagaccgagcacatcgtccgataaaccactgctgggatgtcgtccaagttaatacggtatcctcgaagtttgacctgccgatcatctctactacagcaatgcaggttgccatgctcatccaaaaagccaatgtccccggagcgatacatcatttcttggtcaaagccctcgcaaaatggatcaggtacaatttcttctgtcgtcttcttttcaattccaagatacccgcgggatatctgaaccccggcgatatatatttcaccgatcgtcagcataggttgattattcaaattgatcgatagaatgggccataatacctctgtgggcccataaatattataaagctctctgtccgaagcccatcgttcgaccaacgcatctggcacaggttctccgccgaagtgaatctttgtgatagtcagaaaattgaaatatactataaagttatgatgtgcaaacggataccataccgatttcaagttaggatagtctcgtgggtccagttctccagccagggaaggggtgagtgttgctacatccacatctgacaggtgagagaatttatcgtcctttcctcggggtagtaccaaagtacccccagaacagacggtcgagagaatctcgtggatacagccatcgaatcctggagaaagcatctgaccaattcgtgtgctgggacggcttgtgggtcgagcggacacggaggaatatagggcgacaacgccccgatgcctacacagcactcctatgccaagtcaataattccacgctatgttaaatattcccgaagacgcacctttgggctggccagtggacccagaagtgaaacaaagataagccgtagagctaggctgtggtaacctaggttggaaatccgctggcttgatgtttttgttcagaatatggtctatcgctagtgtgagtggaccatttggccctgtcttttccatttgcgaagtattgggaagcagtagaacctgggcaccgctgcgttcaaggagctgagcacgatattcctcagggtacgatgcgtccaccggacaataaaccgtgttggcttgcattgcggcgagcattccgacaatccagttgctggatcggtctgccaaaactgcaatgactgcaccagcggggacgagcaaagtgataacgcttgtaattttgtccacacgttcagccaattgagtatatgtcaaagccttctctcctgcttgaatggagatttctgaagcattgtgccacgttgaatattggaacagactgctgatagtttgacccgaattgcatgtaaagctggaagtcgagttactgtttccggctgtcaatatcttctcgcgcatgtgcgcggggaatttcaggccgagacactgctgcacagagaaccggctgcgaatcagggagtgtaagatgctatcatagatatctgccatgtcttgcacctgagttagtgagaacatatcggtcctatagaagaggcgaataccctcatctgggtcgatcactaggttgagaggaatgtctgcagtattttggaatgacggatcttggaggcactttacggctgttgttcctctcctcagcccaccatcttgaacagcaactgtggtggagaatgctggtatgtttgatggaacttccgaaacgtgtatgctagccaggccttggatttcacgatgaatctgctgcaaaaacttttcagtagatgaggacctgtcaacccgaacaaggacaggcaacgtttgaatcaacgggcctatcatggtgtctgcccatgagaaaggaagattgcggcctgagaagacacttccgtacacgattgtgtccgaattggtgtaggttgtgagcagcagtatccatgccgcattaaatatggccgctggggtgacattcacagcgcaggcgtattctacgacttttgcccgatctacactctcatatacagaaatctgagcgtggcctggttgacgggggctaagcaaactagcgtttggagatgctatgtcgccgcacgcatcaggtatgagtggctcacgatcactccaatgttcttggatctctgtacgtgtttcacgacgtagctgctccatatcccttgctgcgatagtgaacgggagagagctctcaaagggtctgccttcaagagcagcatccactttctggaaaatcaaggaggctgaaaatccgtcgactaaggcatgatgtacggtccacattactgtgctttggcctctgttgagcccactaccttcgtagtggaaaacagtggaaaaccgcaaaattactgcccaggtcggcacggctgattaattcctggaacgccacgtcgacatcatgttgagatttcaccgttgtttcttcccaagcaaacgaagcttgtggctgcacaatctgcatgggttcctctgttgaccagctgaaagacgtacgaaacatgggctcaactgagacgacagcctcccatgcctttttgacccggtggatatcagctgtagcataatgagaaagttgttgcacatagttcatctggtgattgtccatggtagctaagaggagggccttttgaaggggtgtgatctttgatttcttccggcactgtagactggtctcttgcgtggagacatgagatctctgcccgtcacaccgacctatcaacgcttggatagatggctccaagaggatgtcgcgcacgggaactgtaaacccgtactggcgacataacgaggataccttgatagcagccaaggagttgattccatagctgattgctgattgattgacgtcaatttgatcaattaaaatatccgctacttgagataaagctgtcataacagcttcactcagtgtcgaggtagcagatattggatcctctattgttgagccaatggattccttgatgatagctttcaatgccttgaaatcagtcttgccgttcatcatcggaagagattccaggacgaggatgtggtccgggaccatgtagactggggcattcatcttccacctggctagtagactagttgtgtcgatggtacctgaaccaacaatggagactaggtgaccgttcaagaggagtgagaacgaaaagcttagacgattgttaagctgcagaaccttggcatcaacatcctgtgcgaggttgacgagaaatccacggattggacccccattattaaacatacggtttactccgacaatggcttgatctcgtagagaatctatccttcttccattctctctcttcgctccaagagcaatgtcataattggcatcgaaatttggcttaacagttgggtactatttcaatcacagacgtgagcatcatcaaagcatatcagatttttccctctggagggcctctccatccagaacgtcttaaccaatcttcgaaagaactagctcgtaggtggagttcctcccaggaagagtcttcggctggatcaagagccccgtagcaaatcttgtcctcgggcgctatcgagatccattccatcatttggcgaatatcctccttgaatccaactcctaccgctctggacgccaaatcagcccattcatccatcgagattggggaataaatcgctggctggccagtgacgcgcgtaaaggtggatgcaaattcgcccatccgtaatttcggactgcaaacgacgtaatttttgttctttgttttcgcaatgcctaaagcgaatacctctaagagaaactcttagccttgcacttctcattggccataagtaacttctctccagtatccctttgcaaggcgtgggatatcccaccaagtctcccttggtagaagagactacaaaagattcgatatcacaacttacctgcagcaaaaatacccatatcatgtacaggatcaacccactgaactaattttgtaggcggaatcgggggacaaaaacgaaccaccccatttgctacactagttagaaatattttccacgggaaactctctatcagaactgaccttctcttcgacagtactgcggacgatccaggttggtgaagaagagaccttcgagaatggttggttaaaatccacaggaacgcctggcgtcagcagggagactaaccaggaagaaggcaagtgaccgcaggcaggtcttgctttgcccactgctcaatgataaacttatgatccatgtggaaaagtttgtcaaagcgaccagaagtcgctcgtctcatgtctggcaagctactaaaaacaaagtgctgaatgcggcaaatcttcgcggcggaaatgatattcttcccactttcgagctccagctttaggtcatcctcgttttcgaccgttcttgaattaatctcgttcgtcaccgcaaacacaccgtaagccccagagaaagcgttctgaagactttctatatcgaaaatatctgcggaagtaaggctaagacggtgatcggaggtttgaaaatcattcaaaagacattgagctgaaacggaattgacatccctagtgactgcgcggacatgccacaattctcgcgaatcgtcacttaaaagcgaactcactacgcctttgccttggtgtcctgtagacccaagcacgacgatgatgcggttctgcgtgttggtcatttcgattcaacaggaaagtaagcaaccttgcgtggccgggaggggagatagttctgaatgagaaggaaattaatgagatgaacaggcggctccaggagaattaatatacctagctcttttcccagtttcactctcgatacattacaaattcagggctggctgacttcgtgagcggatgaaccatctttccgtaccggagacttatgcttatgatatccaacgtcagggtgggtatgccccacaaaacggaagttatcagaattaggtatcttttgtatggcccactcatataaaaggtacatatacctaacagacccatacctagaacagctatagtgaaacgaggatgaaacaggatgaccaatcctacagaaaagtgcatgttgttataatattcataataaatagtggaactgcttcccttgtaccttaggaattcgtcttcgtctcccactgtgagccaagagactgctccaagcccttgaagtcgttcaccctgtgctttcctttcgtgggaacgttgacggggacatattccttatggaacaatatagcttcaacagcaatgggaaactcctcgtatgcagaggactggcaatcgtgctcaaggattcacgttggccgtggagtcttcatcaggtccgggttcttttttattgcgtcccaatctggttggtgacatgaatcgtggttctccttgccacctgtttggatcagagtggcttgtttatgcctgtccgaaaatattagtgaccttaaggatgtgtcggatgtatcaacctgatcttttccgcagcctgtaagccgaggggcacgctgttcttccctgcaagctctagagaaattgccaacgcagccgcattctcaatagcctgactagcaccttgtccagccataggaagataggggtgggcagcatctcctaccaagagaactcgccctgcgggagatagccatgtctcaaggggaggcctagtgaggagggggaaattgatcgccttcccgggcggtgtccgcttgattattggggcaatctggtcccagcaaggccagtccttgatctggtcaagcacatcctgaacattagccggagctgtccaggactcgcgagcattgcccttggggtccggatgggtaaagattcacatcacagccttgcccagcttcacagtgcacatggtgaactcgcaccccttgcccgcgaatgctaacgcctggtcagtttttcctgcaccagcaagcaaccagtttgcctcagggtctggggcaatctcgtcggcgtcgaaatatgcccggaatgctgcatattccgaactcacgggcgccggatccttgcccgtcacaaatcctagagctttgctatgcacaccatcgctggcgattacacaatcagccgacaccttctggtcgttgaccaccacgccggccctctagtctgtctcgaagtattctgagactcgcgcactgaactggacttcaatcccaagttctgcgtatgctgataaagaatattcgccaggtcacaccggttcaaaaagaacccatcgccctttcggaacccagatatcgcatttgtcacgatgaaattccccgcatagtcatatatatcgactgctcggacatggctgacctgggcctcgagctgtcggtgaatatgcccatttgtcccccatttggagacaacacgagccgcgttggttccaattccaatgcaatcaccttctttctgattagatgcttttttttaagttttccagattgatatatatcaggattgacataccttgagctcgtggtgaggaggccttttcgataattgtcacctaatgacctttgcgatgacattcaatggctgcagctaatcctccaattcataatccgacaacaataacgtttattccactggatcgaggctcagcaaccgcgtccaggccccgtaccgatgacacagtcatgatgaagtttaatgagcttggaatattcgtggggtagaattagagggcggattttgaatgatttgaatgtgtaatctaagtccatcaaggcacgctaggaacatgcaagggttaacggcttgcatatactgtggtaagtagttacttgcactacgtagtgaacttcattccgattcccaacccgcttctatgtcgtaggcaggttaatcccgcggatatgataagtccacattcaccatagatgttggttgtaaagcatcacaccgccacttttacagtattcttattatggtagactcgtgacaaacggtagcaaactacaataaataaaacgtagcagaccaagtttccatgatgatgcgcaataattcaagctccgtagactgtgacatgtcctcgattcattcgagatgatcgcgataaggcagcatgactaccccctatagtaatgaaccttcggtaggtggctttcaggttgatccctcatttcctgcccagtctctctctcttccctgtacatgctctttaagtatgttatgatcgcgtgatatatactacgtatgagtcacgtggcaatgaccagcatcacgtgataagtattctacgtcaatcacgtgctttaggtattatcacgtaatatactcaaacaaacacaacgcccacgccaagcaaatgaacaaacaaaccgcggcgtagccagtaggccggctgcaggccatctaaggagacgacagtcgacctgacatagcatctcgacaattcttttggcaatgtcaaagtgacaagaatcttggccattgcgtagtttcaggtggtttcagacttgatgaactggcaggatggttgtctcgagggaattttaggatgattgttgaacaaagagagcacatggtgctttggaatcaaaccaaccttcaaacaaaaatactagacaaagggctagccacgcgaattagaaactcggttccaattcattcaaggtaaagtcggtcatgtagcgccataacaaagaggtcaagtccctgcctatcaagagccgcgatgtcaatccctcggcgtattctgggcgatgtaattagctcgagtttatctgcttggtacatcagcattatatcaggttatcttgaatgtgggggccatatagtatagccagtgagatagcaaggtggtggtgttcatgtgaagttgtaaaggcagaaagtcacctgccccgcttctactaatatccctcattagttgaccaagccatggatgattcaaagccagttgatcagatattcactaaagcactaccgaagattgaggtatgattgatgcctcgttcccctcttagatttttctgactcgatcacactacagctgcacgctcatctcagcgggagcatcagtcgccaatgcctgcatgaaatttggaaacgcaaaaaagagcacaatcccaatctaaatgtagaggatccgctggtactgatgcctccgggcaaggtcgattatacactggaaacgtaggtgtctgtgtccacaccgaacgatgctgcaaataattattttccatgctaaccaaggctcaggttcttctccacattctccaagttgacctaccaactctgcaacgacctagaaagcttggtatatgctactaattcggtcctggaggactttcttggagatggagtagtgtatcttgagctacgaaccataccaagagcatctcctggtatcactcgagagcaatacatcagctcagttctagctacaatcgagacattccaaagtaaaacacaacggatgtctgtgtttttaattctagccatcgatcgcggcagcatgacggcagcagaggcggatgagatcgtcaatcttgccatcgaaaacaagtcgcgcggtcttgtgggggtggatatatgcggcaacccaaccaaaggcgatgtcagcatctacaaagaatcaatttcgaacgcaaaagccaacggtctaggaatcaccattcattttgctgagacagcagcttcggcttctgcgagcgagctatcaacccttctttcattccaacccgaccgattaggccatgtcatccatgtgcctgacgaggtcaagaaggagattgcgcggcgcaggctctgtctggaactgtgtatctcttgtaatgtccatgcaaagatggttaacgggggtttcttggatcaccatttcggttattggcgacacgaagactgccctatcgcactctgcgtaagttcttcccactgagatagagttctatttcctctctgactatctatttgcacagaccgacgatgtgggatttttctgtagccccgtctcgaacgagtacttgttggccgcacagcatttcggcttgagtcgtgctgatctcttggaaatgtgcatcaagtctgcaaatgcaatttttgctggcaagtaccacaaagagagaatccaaagtatgctggaaggattcgctactcggtttgactctgcatgagtggttggaactgtatcggcttgttggatgtcgcttttgttattaccagaaaaagatgtctattgattatacgtagaaaacccgtttccaaattcagccgatttttcctactgagaagaatatcgtggagccaactaaatcatgttattctcaacttcagctacgtatgttgaccagttgtggaagctatacccgattaggcatccgatctcagcctcaaatcgttcagcttccatcgctaacctcaattcgttgcccgcctcgtaccgcctccttttcttttcaccttggtgtcataacatttacttaattctttcggacattatactgtttgcagcgtggattcaatctgcctttgctatttaatcccctccgacccccagcatctccacctcgttttatcagctccagttgcaaattcaaaatatctcaacttttttcctcaaaacgtggacgctcctctcacatcactcaaagctttaacataatgacgacaaatggtgctctcccacagacactcaagtctatcactgccacgaaaatcaatgaactctccaagcaacgcgccttatttgatcggcgcaaagccagaatccttgaagttgccaacgaagccccagatctacgcacccgtgctcaggccttgctgtatggactcacacgcctgaaaggataccccaaggatttgcttgacgaacatgacctggatctagatgccgatccctcacctgaggaatcggaagataaagtcattatttggcgagtaggtcgtttgcagccgggagatcatacgagcatacatcgctttcttctccaaagtcgctacgatccttccatctccccggcagctatacaggatcgtgtcgatcaacttgaaaaggagttgcaatacctcgagaaaaagcatgagcacagtgcattttacagcaatttggttactgagtggctgtcggacttggatggaagcatcatttccaaatccacgagctcgggctcgagctccgacaacattgcgcgggcggaaatgcctgagcaacgcgcgacttgggagtccttgacttttactgctgcgacacatgtcaatgaagatgcaattcggtcctatcttgatgatcttttcacacaaaccaacctttctcgacaggcactcatggatctccgagcaagtatccagtcgtttgggacagaattatcctcaaagaataactggttcaatgtagaggaactcaagtgggtctctcgcgcacttctcaagtccgaccttcttagcgatgagaagacatccattctgaaagagttcatgcggaacaacgaggttgcccaggaagtggcagatgtgctcaacatgcgcatttcctcgcttgacagctggacctggagcggagccgcagatggtgtttctgttgagatgcgccgccagctgaatggtaaatatcgatttttcatggacgaagaccttcttgatgcccttctgctacagtacctcgggacaaagtgggctgtgaagctgcgaactgtatttgagacattcctacactcgaacgcctggaagcccttaaatgaggatatcccagacgatcacaaggagatgcgaaagtacttccttggtcgagacgccaacttgggtgctgtcaatctcaacgagattcgaaggatgacatacgccgaccaatatttcatgagccaactacccacatcaaccgccgaaggcgctcgggagtatgatgacaccacgaattccagtccagaaaaccccatggataaaaagcactcccttttgcaccttctgatcacagaatccatcatccataagcgtcagcgcggggactttactgcaatccgatcggactttgagtggtttggcccttcaattccccatgccaccatgctcaccgtgctggagttctttggggtctctgagctgtggatcaagttctttgttgtgttcctagaggccccgctgaagtttgcccaagatggagccgagggctctgttcaaatccgcaagcgtggcgttccaatgagtcatacactgagtgattgcttcggagaatctgttctcttttgtatggactacgcagtcaatcaagctacagacggtgcctttctgtaccggctccatgatgacttctggttctggggggcagagaatacttgcgtcaaggcatggggggcaatggaccagttcactcaggtgatggggttgaagttcaatcaggagaagacgggaactgtgcagatgggcctgaataaaactccaaaagattcagctcttcccaccggtgatatccgctggggcttcctggttttggatgcggagaaagagagatttataatcgatcaaacccaggtcgaccagcacatcgaagagcttttacgacagctttcggcctgcaaaagtgtgttcgcttgggtccaggcatggaacagctacttcggccgcttctttaccaacaactttgcaaagccagccacttgctttggtcgggaccatatcgacatggccatttccaccctgagccgcatcgagcgcacactcttcaacaaaatctcagatgataaaagctcgtcgaatcaaatcagtggtgtcactgactatctacgcactgtgatcgcagatcggttcgatatccatgatcttccagatggattcttctattatcctgttgaactcggcggcctgggtcttctcaatcccttcgtccgacttctcgccatgcgtgagaatatgaaacaaactccccagaagctattccacaaggcctcgctgatggaggagaaggaatacgagggggacaaagaagagttcaaaaggaacggtgctgatgttagcatcccattttcgagcaaatggggggtcgaatccacgtcattcatgtccctggaagactacacccggtatccagaaacatttagctcctcttttgtgcgcgtgtacaggcaactagccgaggttccggatgagatgagtgttgatccgacttggagcttggtaagggagcaaaagtgccttgatcaaaggtcctctgaaggttctataaatgctttctggaatacaatgacgccctattggaaatgggtggcggagttttaccacgaagggatggtccgtacttacggtagcctggatgccgtgaatcgccagtctatgcccctgggtgtcgtgaagacactacgcgagggtaaattcagatggcagggttaatcgagaatccggtttattcagcagagcaaattcatttccgaatataggataaataaaaatcattcacttgctattctaactaaatattgacacatactagttaactagtagttacatcatgaaactagtttgttgcactcctctgttaaacggcaatgtcctgtagaagtgaagaataaaccacacctagagtaacaactcactaattatctcggactatgctcattaattatacttacatagatatacctaaacccagctgtacacattcatttccctgagtttctaccctccactcctggtgatatattgtattcacacccgcagtcgttcaccatcattatgatgtatataaggtttcccgcagtctgggtgctgcccggtttcaagatgtactttacttattgcgatacttgtggcgctctttctatcatcgccgaaatacctttcggcctggcaaccatggatgtagccctaatttacctctattggggaaagtaccttcaactacgatcggaactcgatgtcggctctcaagagggcttagtagctataacggtctatatatacagccatttgaatccagctctctgcttggtttatcttatttcttcatctatcttctctgacacttacatcattcagccctcaggtataaatcgaatccacttcaagtatccctcaactagccctcactatagagtacattcaatactcgattcaccccacgggaacaagaccagaaccaacccttcctcacaaatgaccaagggctatatacaacatcgcacgatggcatatgtgcaaatggacttcaactggctcgatattatttctggggacaacgggagcatagacccaaggtaagcatctatatctatatctcttccgatatacattaaaatgattcacaggaccctcaaagtccatcaggtagttacagcccaccaggacgaaacatttcggtccgaaaaacagccatctccccagccatctccccagtcatcgccccggtcctcctcctccctggacctacgagctctaggtccgttgaagctggaacatgaccctccaatcccgagactaatcagcaagtcatctctccgtcggctgcacaattgtctcaaccaacagggccaaaggcgaagattcatcgagttccgcgtcgaagaagaggacgcggtatcactagtcaggactccgactgacctggagtacgaagattccttcctcccgttctgtggagccttaacgccaccgtacgggagatcctccgaagacacctgtcattcttcatcaccgtcgtcttctcagcctgagcctcagtggttggctcttgtgattgcgcgagttgtatcaagcaaggcccgcaaatcatgtcgggccttgaagaagaagttttctcggtgattccaaggaaagaagattgttacatgatccaaggcagatcatggacccccatgcatattattgtctattatcgctggcgacaaatcaccttgtgccagtaagcaaaatcggggtacttttttgcctttcatccggaattaaatatatatttttcactttcaattatgaaaagatagaatgaagcatatatttgttaaacaagtgtcgttgaagtaagtgggagaagtgtaactagatgatcgaaatgtgtatctaagagcggtcggcccacctgcccctgttatctcggcagagttgcctcttccccataaagccaccgtgaacaactgcggccaggacatcaacaacacccatttccctcgaaccaattcttccacaacagccaacatggatcccttttctgcagagggcggtacgcattccagttctttctacagctccgatcaacgctaacccagcttccccgcagagctcctcaacatccacagcgccttccactcaggccaataccagaatgtgattgacttcgagaccgccgcgctctcccccgagaaccagctccccgctcaagtcctccgactccgcgcccagattgcccttggccaattcgaagaaagcctcgccgagccctccatcgaagaggacagccctgacctctccgccgtcagggccctggcactgcagtcctccggcaaaacagacgctgccctgcagctcgcacaagagctcgcagagaactaccccgaaaacaacacggtgcaggttcttgctgctactgtgctccaggcccagggacacagcgaggaggcgctggcgctgctgtccaagcaccagggtaacctcgaggcgtgagttaccccgttgcaagtaggccgcgaatataacggagcatgttggtctgacattctatttctcctagcgtctccctcattgtccagatccatctcgtacaaaaccggaccgatctcgcgctcaaggaggttcaggctgccaagcgctggggtcaggattcgctgctggtcaacgttgccgagtcgtgggttggcttgagagttgtatgttgatgataaattcataatcttctggttgatggttgatggtctatgagtgctgatttgtgtttctgtacagggcggcgacaagtaccagtctgctttctacgtcttcgaggagctcgcatccgcacccggtacctccgcaccgctatctatcgttggtcaggccatcgctgagatccacctgggtcgtcttcctgaggctgaggctgccctcaccgctgcccttgagacataccctaccgacgtggagttgattgccaatagcattgttttgaatgtgttggctggcaagcagaccgaggacctggagtcgtatgtcatcctatcggagaagaagatagtgaactcgatgctaacttttatctcgtctagccggctacagcaggtccagcccgcgcacccccttctcaccgatatccaggagaagagcgagtttttcgatactgcggcggcaaagttctctgctaaggtctcatcgtagaaatatttcaatgctgttccctatatttgttatgtttaatccgagtcaggggagcttatcctacttgtttatgagagacacgacctatctcaatattgcaactggtgtcatatttggatatctcatctgtaatttggtacaagagataggaacaatacaaatctgtttctatcacagccgagaagccaaccattctcgcaacgccgaatgagtcggagtctcctccttcatcatagtgaaaaacggcgcatcatgcgactcatcctgcccaatcacaaaggtaatgtctttgaactccgccttgaccttcttcgcaaactcccgaataggcgaaagcaaaagctcatcctcaccaacaagaatcaaaatcctctccgtcttagcactctcccaccaaccagggggtgcatcaaacggctggttccaattatcctccggcagaccggcacggtaagaaatagtccacctctccaaagcctcccgcggaagaatatccttccacttattttcctctatcgacggccagtccgtactaaagtgtatccaaggcgagaacgcaaagacgcccgccaacggcaccgacagctccagcggcttgatttccgcgtgcgggtgggacaggtgcagcagcgtcgcagcggcaaggtttccgcccgctgagtccccgccgatgatcacgttggatggtgagcggcctgtctcgttgatgatgtagcgcagggcctcgacggcttgtcgcatctgggtcggatacgtcgactcaggggtgagcgagtaccgtgggaagaagacggctaggttgtcgcctgttttgtccaagtctttcagcatgtcgagccagaattcgaagtacgctgccatggcggggacggcgaaaccgccgcctgtttttagaagttagtattttggttgatatcatgcatttaagttatgattagactttttcctctgtggatgctaatttctccgagtgttacacggtggggatcatagacgcaccgtggtagtatataatgacgttcttggcgtctttgtttccgatccagtggccctcggtgttgtgtgggagtacgacagtctcgggtttgagaccgtgctttttcataacgccttcgtaggccgctggagttgaggggctgaggtacctgtgcaataatacaatgtcaatgtcgtgtccattctgatgtttgctttcttgcaacttgcagaagaattggagagagagaataacatactgcatctgacgatctgacctccgagtaaggagtttgcgaaccacagcggacacaacatagtgatcgtaacgcctagggctggctttaccccggaaaacaccagcaatggcagcatataccaagctgccgcaaagggacaggtacatgaatgggatatctgctttttcccagaaaccgagctgcggcccagggccatcttcgttcgacgacatggtggtttgagtgattgaaagtcttccgctcagccatgggcttttgtatcctcaatgccctcagctgtggggcagcgggacctgagtccgttgggcgctgattggttctgcgctcatatgcacgagcgggacctcgggaactatcagttcgggtagatgcgaaaggctcggtagccctaacttcctttatctcccgggcagcttacaacatacatagtttcaacaaagattcatatgaactaggagccctaataaatactcaatgaagggtcctggtgatatgaaacaggtgttcttcctggttggataacttggattttgataattctcccggaactatatcaaaaaacggagcacgttgggcatgtgccgaagctactgtgagaatagagacttagtttggatgggaccgcttagagcagggaaaaaggaacgaatagagagagaaagatagttgtatgtgactctttttgtatatacatgtgtgcatcaggagaaaagagatcctagagggaagcaggtcctacccagcagccagctcatcactggctggtttggcttatctataagttttcaactagacacatagattgagctcataaacccaggctttgcttattaccatatagccctggaggaagtgggccacgtggcacagctgaaaatatgtactggaagtgtgaagcggtccacaactcagctcctcatccagcttaactccagcttaatcccgatcaccgctattcaccgcccgtctctttttacttcggaatatctatagtccgtgatcgtcaccaaccctttgattgctcttaccttaagccactggggaaattataaatacctggtcctccccccagattggttcccttttttcttccttcttcatcctagtgcaagggctttacacgtatcagtgaggagacatccgagatcgtgtttttgctggttgaaaactaccaccttgactgcttcaagtgagccttacggcttgcttgggaatttttgaaacatgcttacctcaactccttgactcttgagtcctcgagttgagttcctttgaatttgatgccatgatggatatttgacctcagtgtgcgatcaccagtatcacgtgctgccacatttagatctttgttttgtttgttcgtttgcttgctcgcttcctgtttgcattgtttactagtctactttcatagattgtttggtagatagctaaacgagaggtttagggtttgcaacgtttgcaaagtgtcagttgtatcaacaggctgcttcccactgcacttgcttcttccttcatccttcctgaattgattcccttctttcttgattgaatagacttggtacgtcaccgtctttgcttgcataggtagttgccataattaccagttgatttcacatgttccttccttccctatctatactctaccttccctccccatctgataatgctgaaccctcttgtacagaaaccataccacatgatggaacttgaaagcgatttcatttcaagccacctgccccattagctaggaaacctgtattctcgatcagccatttttgattcaaatgtgcacatagaagtaagtggatatcatgtttgcattgtttatcaaccccggacccaaaaacccgccaaggaacgggtcgggtctaacccgtctacccgcggatttaacccataatatatcctcacgtttgtaattgatgaatgtggcatgatagttatcatagttttcttaataacgatgtgaagagcactcggcctttcgagactaaatgcagtcttagcagtgacgttatgaagaggattctgccgattcacaccgactaagttgagtgaaccccacaaatacagtcgtctccactattccttctcctccttttccccttccccctgctatactctgtacttggttttgaattggatgactcttttcttgaaataactagctagtaacaccgaaggctcaaatatactataagccatactgataatgaaacaagtgagccactatggtgaggtttaacttttgaggcggctcaaaatcaaaagctttatagtcggggttgggtgttgtcgtcaccccttgaataaggccttgagcggaagaaactccaattacaatcttgaaatgaaaatcctctgtgctaatttacccgaccgggacagacactttgacctcttgttggcaaaagagtcctcttcagcgacctgcgatgacctttcattggatggaatcagcatgcaattcaaaactcgacttgaaaaaagggagataacaagcaaggcaaaccttccctgggaggacagaatgagcgaaaaggacggaataaggttggcggctaaagatggagacgttggagtgaagacgctctagaaatctcgcatgtgatgggcccatcacctctcacggatagcgggctagctctagctaaagccatctatagccagcgaggatctcattcgctaccggtagaacaaggggctgggcaactcgaaacatgtacaatcttgccgagtcagaaaaccgacccgcaaacggacagttcttgtgctagctgtaaacgagatctctttcccggtgtggttttagatggttgaaagcagcgtgtgatactctttgatgtcatattagctacgcagtgactcgggcagccgtgtatggtctgcgtcgggacaaagttccctaaagtatattccacgccgaggcacgccgacgataatggaccgggcaaaccccatggggtaaatgatctaccaagtgagcaatatacgagggaaaccccagataataaaacgcccataggtcatcgagtggggccacttgtcgtggctttctcaaacttgattacgattcctggggccccgcattcctgggctctgcattcctggggccccgcgattcgtgaacaaaggtgcctcatgctatagagaggcagtagacggctaaaggtagattaagcggggcgaacttaacccaatttagttgtataggccgtaatgctatagtgcgaatttcttctcttatggaagatatatagtctacagatgtccgactattcttgacatcttttcatcactacgacactccgtgtccttcgctacaatgatgattaccaatatttatgtgatcacagtcatcgctgtgatcggaggctcgctcttcggcttcgatctgtcttcgatgtctgccatgtgagagttatcttcggaggaaacaagcgctttctaatcaatgcagcctttctaccaagcaataccgatgctatttcaacgagggacctaatgggcctccattcaatgatgagtctcactgttccggcccaggttccaatctgcaaggtggaatcaccgcctccatgtccgggggttctttcatcggggccttgatctcgggcttcgtgactgatatcttcggccgaaagtcggcgattcaattgggagctatcgtatggttagtcatgtttcaatgcgctgagctgaaagtagctgacgtgatccacaactaggattatcggaagtaccctctgttgcgccgctcagaacatccctatgttaatcgtgggtcgattcgtcaacggtctgtgtgtcggaatatgctcagcccaagttcctgtgtatgttggagagctcgcgcctcctcatctcaggggcttggtaatgggtgctcagcaatgggcgatcacatggggtgttttgatcatgttctatatctcgtacggctcatctttcctcacaggccctttggctttccggctaccttggggtcttcaaatgatccccgcgattttcctcttcatagggttattgttcacccccgagtctccacgatggttggcaaagaaagatcgctgggaggaatgttgtcacattatctcttctatccatgccaacaacaacctcgacgagaactttatccagatggagatccaacagctcaaggatgcttgtgaattagagcgcgacaggaccgacaacagttacatcgatcttttccggccgcatatgctttggcgcacgcacattgtcgtctttgtccagatctggtgtcaactcactggaatcaacgccattctctactgtgagctccctcctgtccagtgtggtggaattaccactaacatctctagacattacatatattttcggaatgacaggcctcagtggcagctccaacttggtggcgtcatccatcagctccgtgatcaacgtgattatgacaatccccgcactcctcttcatggatcgtgtcgggcgtcgtccattactcatcggaggcagtatttctctcttcatctggtggaccctatgtgctggcctaatgggaggctacggtgtcgcagccccgccaggtggcttggacaatatccccgaagagagttggttgatcacaggagctcccgccaaggtcgtgattgcttgctcctatctcatcgtggcctctttcgcgccaacatggggccctattgagtgggtgtatccgtcggagctcttccccctccgtctacgaggcaaagccgctgccttgtccacagccagcaactgggcgttcaatttcgctctgagctatttcattccgcctgcttttgtcaacatcacttggaagacttatatcatttttgcagtcttcgccttcgctatgaccctgcacgtcttcttcgttttccctgagacatcggggaggacactggaggaagttgaagatgcgttcaagggggttaagctggcttggaatatgggtgcagagaaattcaaggatgaagagataacgcttgaatatgagccgaagcaagacgaaagtgaaaaggctgtgcacgttgaggatactataagatcgacgtgaatgtatatattgttgagacagatcacctgccatggtacctggtctgccaggtttctacccagctaactattcagtcagctagctgtttgtttgtacagaatcaatgctcctccttctccccttcttcccttctctttgccctcttttcttttggaagacaggatagcatcccttttcttgaagcaacctccacgcctagcgaattccgagaggtgagtaatatcaaccccttggttcctcaatttccatggattttgaacttctcgacaatcccgaaagtgttccatgaactcggcataggagtaaacgttgtcccgtagagcacaaacattagactgaaccagtgatgacctcagagccttttccaaagcaattcaacaaccactacagcagatcccattctgaatgctaccgctcttaatatcgagatagggtaaagaggtagtcaccatataacgtagcagcgccattcccttagactgtatcactcgcgtcacctcgtcatcttcacatatgcatgaccttctaaaaattctgtcgacacaatctgagttctccttctccgcaaaatttcacccattgaatatactcccgataatggcttcacggtaggcactgagctcatgtggacgcgcttgctcacagcagaatatgaatagtaggatatggtgctccatttccagtcacatgtcctcctttgcgattgttcttttcctgtctctgttgctcttctatatataattcttcgcatactatttctggcacatcccttatgcccgtctaacaccccacctttttcgacgtgggtaacgagccgcttcagatgataagtcttcagttggtaatgtttttttttccctattggatccacctaatagtatgggcctaatgggccagtcgaggatgcacattgcattagattgtagacgctgcgccagataggtctttctctagaagcatcctacttagtatgaatctgagtggctctcttatcgagcattctcttcgtgatagaggcttttcctcttttctcccctttccgactagcggctagttagaggagagtgacggtcgtctacgtaattgagaacagacctgactatatccgaagctgcctctcgatggcggtctaaataatatcggtatcattaaatcgtttagtcaaattgcggtaggttcggtcgtttactgaaacgacaatcgcagtattattagctcttacctgacaatgatgggcaatttttcgtcgaagaagaactttctctaatttcttctctaaaaatagctgataaaaagcactaggggccaaaataagatcttcttctgtgtcctttgaatcacgccggtgagtaagtagttgggtgggtgaccaccagcgaatcctaactgttgtatgtttttcgttttttttttcgttttttttttcatctagtagacattctctctcatcgattgtaaagtgtagaatgatggaacgggctattatcattacgcagtctcccattttgtaccttcagcaatttgggagacttctttgcacttccttcccttcttggttctatagtacaacatgtggtatggcaactcccacctgtaattcttcaacagatttcgatatgtagagtgggtctgatgtacatttactacgtgactataagaagcgaagaagtgatgatcaatggaagatatgaatgatacccgatgccgatctaactactgccatgaagctccctctagttatagaaacgtacggcaaagatgtgctcaggttctcaaggaaactaaaaaagtataatattcgcagattccaccttgttcattgaagcaacgcagttccaggtacttagttctgactcaaaatcagaagagtcccctcccccaacattcccctctacgatgggatgagaaggacctcctcagccccgtagtagccctatccctaccagggtacattccagagccagcaggtgtctctggcggatcacagagaatttggcattctctcacatccggtggtaaaagaaatccacctttaagacgaaatcctgtaacttccgtgtttgacggaccgcgatgatcttcgttgaggacagctgaggagcataatggcgtctcaaagttctggaaacagactgcaagacatgtcttatctgaaagcaaaccgaggcataaggttgtaccggagaggccttgtagcgagtcttgatcatactgtgtcctccataggatagagacactttgggatagcagttctttatcccaaagatactgcgagccctcgacaatagcttgttgagcacgtgttgatactctcgtgcctatcctgcggatttggttcccggttgaaacattgaaactcgtcacaaagacgggattgccatctgacacatcctgatatgaaccccaaccggatacctgtggtgtgtggtcaggtgttaccattcgcggaagccctcggtcgttggtgatcaatgatagatcgtgggtaaagcctattgggaatcgaagaggcctgcgactggcttggtcgtacgtgaatgagattgtaccgacctatcgctcgaaggtacatactgcattagtaacttagaccgtaaatgagaggaggcaatattctctcaacacacatacctcttgcgattctccgacaaggagaacggttttccctataagggaattacctgctgtttggtgccgagccgtcccgacagctggcacaaatgagttccttctgatagggagatatcgagccattttcttcttgatcttctgataccaatcattcatacgaagcagaggcgttggaagcatcgttcggagagtgacgaatgcgtgcgtgggtaccgtaatcgcctcttccccgctagggaaacgaagcttcagacctaacgcggcgtatccatcgacagagttgggcctggtggtaattgccgcaccgcggggaatcacgttcagagtcggttcatcctgcaggatatcgtactgtaggcgtaagcaaccaaaactgtctgcaaatccatcgtggagccaggaatattcgatgtctgagcggttcttgaagagaatcacaatgaacccacttatgaacaccctgacgccgagcgcacacggaaacatctcccgtaacaggtttagatcatttggagaaaggaattttcgggggttgaggataacactgagagggtcattctggagtttgggccatatgacagttgtccgctctatgtatcccgatggttgaacatgaatttccaagccccctgcgtgagtacctgtggtttttttgggagcagaatgtggcgctatggcccacatccacttattatcccactcaagtaccatccagacaggttggaggcagcttagagaagggtggtaggttcgaattaactgccgattcgcatcggtcacgttcggttcaagaagggcacgcgcggctgcggctttctcatcgccccactcagatgagtttgtttctaagagtgaattagcatatcatatactaggctgtattgtcgaagacgcaaatgcttacttggtatctcaatcatgtgccgaaattgttcgattgaatccggcaaaagatcttcatgatgatcaatgcactcggctggtatggcggggtacggaaaaatggaggattctttggcagataaacgttgttttttatagacaggtgagctatgctcttgaagatgaggctgtcttaatccgggcatggtgatggtgatggtggatggtgactgagtataaatcgtgtgtgtcgaagctaattggcttgccgagtgtggatggacaaggatgcaggtcccactgacaattaccactacacctaattgggatgggccaatcagcgtctacttagttatgtcatcttattggtttctaatccctgtccgcttgtttcaccgccttctctaatctcaactggcagatagactggtatcatcgtggaagaagttgtgaccggccgccagatgatatgttttggtggaaagccccgccttggccgaagactcgctgagcgtaaagatggctgcgcgcaatcattgaccgagcacgatcgcagcctggccaacctcactgggatccattgcctaaagcaaaagtgtgaaggggtgcaagacccataacaaaatatatgtaagatttgaagagaagggaccacagctttggtctttatgccgcctgtgtttgaatcgtattggaaagtgacttgacataagtattgcacgccgcctcaaccccctacattatatgatattctgccaaccggccacatttttatgagtctgacattaattagacttaggcttcaaagactagaaatgcggtcattggctccctggagcttatattcactcatttagctgcaaaggcacatcatagccaataaaacgtgattcagcatctttatccaggccataacaatcagctagtacttgtagctgctcttctgagagtatgccatcgaggacagagcctatagataattttagtcgtgaagaaatgggtataaacatcaagttcttaccagtattgatttcgcgtctttctctccaagccctaatccgctctttcaatagagcaattgagtgtccttgagtattagaaacagcctggctaatcggaatgtggagtgaatcaaggttctctaatatctctgaggcgcgactgtattgtccaacccaagcttttcgaataattgtatcgatttccttgatgattggtctgtatcttaggcaattctaattccccatctctattcgtagaaaactcgggtttgaagccatgctccagttgaaatagtagagagcctattgcaaatagatcagttacctcagatagatttggtgaagggccgttgaccggaagcggtagatctgagataacgagatttggttgactaaacggactagcagtactgaaaccacaaaggatagcagagccccgattattaaacaggatattgtcaattcgtatatcagcatgaacaattccaagcttatgaatatggcaaagaccagcggtgatctcacgataccaccgaattctggtaggctgtgtaggtatctcactcgccggtaacggagaatatctgtgaagaaatatcccctccgcttgatcagtgtcgatagcttcgatgatattaggatgtggccactgctgaaatagtcgtagaacagctcgttcatcctgtaacaagctagagtggaagatggtatctgaggcgtagtggtatcagtcgctgtcagaggcgtcgctcccgggttgttcaaaaatgcgacagcttttgaggacaatgtcctcgtcaacctcgtagacttggccggaagctcctatgcccagtattttcagatcagactgaaatagcggccgtatggtataggtgtagttcgatgttccgccgactgtatcattggactgatgaaagctgggtggataggatctgataaagagcggaaatataccagacaagataccaagtgcgccttcaaaaaagagcttccaggccgcacatacagtcgagtaatagttccagaagtagattggcattttgccggtaccgggaaattaggagacgtacaacttgtagaagtggcaatcaaaatcagcggcgtgcagacaccagggggctgaatgtagttgataggaagctaagggggtcagtggggtggtcgcccaactcgggtgattctcaccgtcacgcaaccgtaaaacggcactcatacacaagtgccaatgatgagaaactaaacaatatgttcaaatttacggatgacagatcgtgcgcctggtctaccggatgtatttctggcgcctgtcggcatattattagattggcttaggcgtagtaaatctaaagctcagttgcatcacccatgtggtcaattcgagatttagcagcatggcttataataatattgtggttttgttatttcataccacaaagtcatccctatctctcatgccacttcacaggtttgcgccgatcccagaacggggtgttccatcttgacacaacagattagaatataacaatttagttaccgctgacctagttttcctcaccggtcggggtcaattcacagaatgctttgtaggtcgtaaagacatcatcatcgccctcaccgctgccagtgttctcaatcacacactcagcggtagcgccgacgaagaaaacatagccctccttgacctcctcggtcttgttgctaacagtaatcttgcccttgccacgtgtacatatgaagatactggggccgtcgatcgggtcaaaagtggccttggcgccagttcggttcaagtcggccttgataacactgaactcgtcgataggagggtcgtagagcatcacggacgaggcgctagagtaagcagtggcgttcaaaatggcatacgggtagtctgtggcctggatcttctgctcctcgattggtgcgtaggagtaggtcagcatctgggtgagggtgtcaacgtccttgaacttcggggtgaagcccgctcgcaccacgttgtcagaggaggccatgcactcgatgacatcaccggaaatatacgcgtggatatcatctgccttcaggaacataccctcgccaggctgcagcttgacaaagttgaggaagaagaatacgaacaggccgatgtcgttcgggaactgtccgttcaggcgcttggcaagcgcagccagctcagcggggttggtagggttcgtctccacatcacctgccagggttgcaaaactgtcggggctattgtccgcagccgagataaggttcttgcaggctgtctctatcttttcggatgaagactccatcagcgtggtgaagagggagcgtagcgcttctttgttctttcggatgacagcaggttcctctgagttttcgttgcccttgacaatttgctcgaactcactcgccgcctgattgccaacaagggtgcgcagaggctctacagcttggaggaaatgtgtgatctcggcgagcgggcggaagccacacataccctcgaacggagtgatggcaatggtcatctcgggcttgtgattgtcatcttgcaagcggttagccatgtttccgggtgctcgtgtatcgagtgtgatccgaagtaccactcaccgggatagttctttgggtcccgggcatggagctgctccgcgagcttcttgtttggatgggcttggatgctgagcgctttacggatagaaagcaccttgaacaggaacgggagtttgcctccaaatcgttcactcacatcggtcgacagcaaggcctggttatcctgaaccatgtcgaggagggtacgctgtgtctccacatctttcgatggaagagaggggtgtgtgcccatccagagctataaattgtgagcccatcaagtcgaatattactattgatctctcacttacttctgcatagggcttgtcagactcaattgtaaagtccggggcggctgttgtggcggcatacttggccgctgctgactcttggccaaccttgcctatgacgggatgttagtgcggggaacacaatcgcaagcgggactagcttaccccagtcgtagctattgacgcctaaaggaaagtatgtcagctatgtctctcttattgagcatccccaaacttaccgcattgcagccgaagtagtggtatctgcatattgaaatggatgtttggagggaaaggcgggggtcaaccagcgatcttgtattagaaattccacgccaagccttcggtgagagttgtcagagagggtcccggatgatatctatagcacacgtccagagcttgaaaaggagaattggtctggtttcactcagaggcattcccggctttttgtttatgggatttacggagtggtatcctaatctgtcatagattcctaatgaggtagtacttccgcaagcatcctgccaattagagccaaaatgtacagccgcatcgagacagtatagtttgaataggttcaaggtcaaagtatcccagaattaatcatatataccctaaagaagacaagaaatacactatacaactgtcgacgtcgacacatacaatgccatgtcccaaagtagttagcgtgtcaaccccgaccgcccgggggaacggggcccttatcaccgcatctccaaccttcaagtaaacaacttgttgcttcaaggagatatcaataccacagtggttctggtcggcagtaagctgcttatactctttgcacattctttacactaccccattgataaacggtccgaggatgtctcgcaaccgcccccgacccagagacaacggatttggcaataatgaggaactggagctctggaccaagatctgccaggatattcgaaaatctaaagagaagttcgatcaacaaaactcattatcccagcagattcgagctttggtagacaagatcgcccataatggcaaccgtgagtaccccccgcactagagccctcggctctataccgcaaagctccaatatgcgcttcgcttacaattaatccgaacaaccccaagttcattattaatcgtatatactaatatgcgcttccaagcagaaccaactatggccgaacacgaccaactcgacagctggctccgcctaagccagaaactcagcgaagacgagcgcgcgatcatgcaagacgagccatgcgatgtaatcaaaaacctagaactgctcactgccctgcgcaaagcatctgaagccgaagcgcctccacatcggtccacatcattcaacaagtcacgcaagaaaagaaatgaactcgaaggttcggtaaccgactcccccagtgcctcgggggctgacaagaccgcacgctcaaaggggatcgtcccacgcagcgcaagcgtctcgtcaagcacacaagcccgcgaaggggggcgccaggataatatcatggtcaagatcgaagaagggccgtcagaagggacgaagggcactgtcgcggaacggagtggcttgctggtggttggggctcaggttgtcttcaaacacaacaagaataaacaaggggtcgagggtgaggggatccaatgcataatcaaggctgttaatggcgacggcccaaagaaacggtaagtgatgttaggtcgtttacatctcgtctcgatttacgttgactgacgcgtcatgtctgattcagatatgatgtgcaggatcccgagccgaatgagaatggtgagcagggagcggtttacaagactaccgctgcctctcttattcccattccccagctcagcgcccacttgtctacatatccggcgggcaagcaggtcctcgcgcgatatccggacaccaccactttttatcgcgcggaagtgatgggtgccaggaaggacgtctatcgcctcaaatttgagggcgaagaggacgacaaagagatggaggttgaccggcgatttgtgctggatattctgggcaagtaaacccagactgtttctacgatctgatgtgatgatgataccatttaagcgcggcgctatctggagttcgaatgcctaccatggatatggagctttcatcttgactagatactttagctagagaacaaatcttttttgaactatgataattctgtttttagagattctacgcacagaggctgaggctgaggctgagcagagcagtgccagatgtctacaataaaaaagggttggcataacaacaatgattcaagccatgtcattcccatcatgttgcagaaacaccaatctgacgctattacccccaacggcgatgcaatccagcttcttctcggtcgggataatgccgattgccccctcatcgagcggatattgatggcacatactacatttcagtctcaacgaacattcacgacactgacacgcatgatatgaaatatagccatgtctttgaaaatggccagggcattgatgatggatgtacctatgtcgttgatatatatactggtggcgtgattaattgccgttattgtttatcctttccttccccgatgtcggcttcgagtcgggaggacaatattcaatgcttgactcttggccactaaaaagccatgcatttcataggatagtgtaactccaggtcaaacaagtctgagatatgtcataagctcttggcgaacacaattctcctatcctgggtggaccaaggcccgagagaatgtgctagagtaagcggtatcaaagcgatgactcagcctgcttctcctcatgccgagggagcatagccggagcattgtctacttcgccattaaaactttccatttaacagaatttgccctatatttccgtcagatcgatgcttccgcactattcaattcctacccctgcatactagagcacctgcagcgagcttcacacgtcacaccttccgactaccccgcctccgccgtcgcaatgaccgacctaccggcacacgcctcaccaaaattcgatgcgcgttcgcccccaagcagattagatggacactcggatgatctgagtcaggagagcattgcgtcaggtgaaaacaccccgactctaccggactcattgctctcgcccgcattcaccccacctgcaacccccgggggtacattgaacttggatttaaatcccaccaaaatccttcaccaaaaccaagcagcagatatccaccataatagccaggatgccaaaggcctcaaattactcccgcagcttccagcagtggaatgtattgtgcgggcgcgaattccaacaaccaacggagcggaaatgttcctacacctctaccacaatgacttggatggaaaggagcatttggccattgtatttggaaacaatattcgtagccggagcttggacagcgtgcggccaggggagaccgagatggaccgaatgatccgcggcgcgtacattgggaaattgcgcccgggtcgagtgagcagccggtatgatgagcatctggccgggtcatcaacgccaaagcaggtcgagccaccgctggtgcgaatccactcggaatgttatacgggagaaacggcgtggtcggcgcgctgcgattgcggcgagcagttggatgaggccgcgcgtttaatgtctttccccgtcgaagatcttgcctctgatgcgccgccagaagtccagtccctttcgtcacattcgacaggtggtgtgattgtttacctccgtcaagagggtcgcggaatcggtcttggcgagaagttaaaggcatacaatctccaggatctcgggtcggataccgttgaggcaaaccttttgctccgccatccggctgacgcccgaagctatggactagctacggccatattggaagatcttggttgtggcgcggatgccatccctgagggaatccgtctacttaccaataaccctgataaagtccgcgccattgagggccctaaccatgaggttcttgtaaaagagcgggtgccgatgatcccattggcatggcgaactggcggtcagaaaggaattaagagctctgaaattgaaggctatcttaaaactaaggtatgtttgcaaactattggtcagttaaggattgatactaatatgccgacttttgatagatctcgaaaatgggccatatgatccaataatccatcagcttgtcgttttgaacttttgcctccatcattccccttttcatctggcttatgctttctttcttgcattggaacttacaaaaagcctttgtatatgatcgacacgaccgaacttctttgtgcataatcttgattctttgggcttgttccaaggttgtatatggcgttgatactctgtatattctttttttgtgtggcttggttactcaatgcttccatgttcgccagcttctcctaaaaattggaggttttgtctctagatatatagcacttggaacaaataaagtcagtttcacggtcattcccaagaaggaattcgataatacgcatgcccgcatgaaagtttaaatgactatctcaaacattgacccacatagcagtcacacgtcttactccagagctcctgattttctattctacatttccccggcctgtatgggataagcttaattagcgcgtgtgcaaggccatggccacccgcactacagacgccaatgggcatgtggccccttcgcccgacctgtccgacttgcctgaacgtgcgcaatctactccccacggacccgaagactcgcgaatccctgaacgtgcgacctcgatagatagagcaggactcttggataatggcgcgacgccaggacgcaagcgcaaactgaatagcatgtcgtcaagaggtgttgccaacctcactcctgatcagttggcgaaaaagcgggccaatgaccgccaagcgcagcgcgcaattcgagaaaggaccaagggccacatagaaggtctggagcaacaggtccgggacctgtcatcacaaaagccctaccttgatcttcaagcagctctgcgtgagaatgagttgattcggtcggagaacgcggagctccgccaagggctgaaagcggcaatggacattctccaaccattgatggctaagccagaactgcgaggtgagttcagcattccaataaaattcaagtttggggctgatatagatagatgcgtctcattctctagctatacccaagtccgccccgcccgcttcgcatacatccccattgtcctacaccgaccacctcacccccttttcaggcgagaaatcctaccccgagtctcttgccagccttgatacgccttctccgactcattctgcgcctaatttcgggagtcgccgcaacagtacaaatggaagccctccgtcggcatctctccgtgtcgcatgggactcgcaacgccataatatcactcacggcctagacctcggctgcgaggagcgtctagggtttaatttccttcttagtgatatgcatagtgttcccaaagtcgacgttgttcaccgcagcaccccagataacctccgctatccgcagctgaacccttcgtcttcaatatacccacatccctcgactactccctctaaaccagggccacctgcattcgccgctccggtacaaaacttaacagcgacatgtccgttggataccatccttttggaatttctccatagccgacaacgcgaggcggctcaaggcatccctagacaaaaattagccgggccaccgtacccgagtgtctcttcgctgctgaatccggagaggagcgtctactctcatccagtctcaaaagtcttcacagatatcctgcgcgcctttccagacgtcgattctctgccggagcaggttgctgtcctctactccatgtttctcatcatgcgctggcaaatttaccctacgcaagagaattatgagcgactcccagattggttaaccccgcgcccgacacaacttctccatccacaccctgcttggatggattacgttccctggccgcgaatgcgtgacaggatcgttaccaattaccagaactatccgtttgagaattggttcatcccatatacgcgtgagatgagcctcaattggccttacgaggatacggactgtttgctgtcaaccggagactcggacgagctggttatcaacccggtcttcgaacggcatatgagaaatttatccaattggtctttggggcccggatttgcaaaatgttttcccgctttggcagacgctacacgaatcatgccgaagccaaagctcaacccatcaagcggaacagactcacatagtggctacacgaccacttaagcggcattccaactggtccacctctatcaagttgatcttggttagaatttttaaattccatgcctcttttcggcgaaaaggaaatcctagcttttagctagtcaaattgtttattttttttggtgcttagttttcttcggcggagtcttaatacacaagggaagaagcatgctgtgagaagggccacggtcacctcattcgcgttgtcaatagatgaatcttgaagagatcatttctgtctggacattcaaacaaatacaaatcttcttagtaatagttactctgttgtatatcttatgggagcatggttttgactttactctttcctgctcttctcattccaaaacgccagaccagccttctggcgtagaattccgtacatcgaactgctatccaggcactctccgccatattctctcgcagcctccatgttagtcttggcaatctcaaggccaggaagctcaacaccctgatcctgggccattgacatagcatgtctagcatccttgatagcaagagaaacaccaaatccaggatgagagtccaggggcggcgcataagcaccggtagtcaatctggaaacaaagataagtatgaaacgccatgccagcaccgaaaaaatactgtaacacacctcttagaataccctccggcaacagcaccaaaagcctcgccaatgagttcttccataggaccagttccaagtccggtcttctcggcaaagacctgagcctcaccaacagcctccatcatgttaacagtaacaatgttacccgcgattttcagaagggaagcctttgtcgcatcctcaccgcaatcaatcacgcgccgacccataacatcctggatcagaggtttgacggcatcagtcgcactcttcgggccaccaatggcaaaaacaagtttgccatccacggcaattgggttcccgccgaagaccggcgctgctacgtacgatgcacccttgcttttcagctccgatacagccgattttacagtatcgggatgcactgttgagcagtcgacgaagatcttgtctttcaaggactggcttgaacccatggcggtggatagcaggctttggaggactgcgtcattcgagatctggaagaggctttagacattgctatgtatttctcggtggaatctgcttaccatggtgaaaataattccacattgagacaccaacttctcgaaattggctactgggattgcacccagtgcttgcaggggtgctccgcgcgacatcgtgcggttcgagtagatcaggctcaaggccttcttcgtggctaggtggcgctgcagattggaggccattgctaggcccatggacccgagtccatactgtgttttgttagttctttgttcataattgtaggtgctctagaggctgattacccagccgatttgtggcatcgttgctcgctctttttcctctggatggattcaaagggcgacaatgggctctttagacaacgagtcaagatcgattcgagggattcaagcgaaatttggcaatccagagtttacctgtgcagggcaatgcgatccttgtatgagtctactttgtagggacgataggaatggtggagcgtgtttcccgaggatatcggtgtcggccgacaggatacgcttcaacgttatcaacggtactgcatatctgcaggttaaaccgggcttggacattgttcaatgaatagtcatatgattcgtctctttgccatattcttgcttggtgtgtcgctgtagtcaagtccacgtgtataccccttaatgtgagacgttccacatatactataacctgcgcatctattgatttcagcattatcccatgctccttaagacctcaaaatcttcttttaggccctaatttatcatctctgagttcgtctggtctaagaatgcgttgacgtggtcacgtaccgtcatggctgcggctcgccgcccaactgtggggtgaatatcaggtacggtacggtcacgtaagttatgatgctccgtctgtcgtggacttgacttcaaatatccccaacacctccgctctcccctgaaccctcctatttccactcatcttgggagtttccgaatataatctcagtcttggacggtacccctactcccaaccgtcgaatccctaattcctccaacatggcggaaatgcccattggtacacaccgattcccccaggctaccgtgtcccagctccaagctaacaagctactccgcagtcctcgatggaggaaccggcttccttaaggtcggctacgccgcccaggtatgtcgcatgacccctacagtccatgtttgctcttctctaatttatatttcctcgtcagaacttcccagagttccagtttccctcgatagtggggcggcccatcttgcgaacggaggagcagggcggcgacatcgtggtcaaggatatcatgtgtggtgatgaagccgccgctgcacgatcaatgctccagatcagctatcctgtatgtttatatcggggttcttgtcctcgcctgacctttctaccccgcctccgcaaaccagtcgtgttgtcaatgcctaacccgcgctgctttagatggagaatggaattgtcaagaaatgggatgacatgcaacatctatggaactacaccttctacgagaagatgaagatcgaccccacggaccgcaagattctcctcacggagccacccatgaacccgctcaagaaccgtgagaaaatggccgaggtgatgttagaaggatacgggtttggtggtgtatatgtggcgatccaggcggtgctggcactgtatgcccagggtatgtgatacaagaccacagtgtcagttgaagaccaatactgatgtcatgtttcaggtctgagcagcggcgtggttgtggattccggtgacggtgtgacacacattatccccgtgtacgagtcgaccgtactcaaccaccacattcgccgccttgatgtcgccggccgcgatgtcactcgcaacctgattgccctccttctgcgccgcggctatgcgctgaaccgaaccgctgacttcgagaccgtccgccagatcaaggagaagctcgcttatgtctcctacgacctcgagttggacaaaaagctttccgaagacaccaccgttctcgtcgaatcgtacaccctgcccgacggccgtgtcattcgcgtcggcagcgagcgcttcgaggcccccgagtgcctgttccagccacacttggtcgatgttgaccaacctggtatggctgaaatgctcttcaactgtatccagggtgccgatgtcgatgttcgctcgagtctatacaaggccatcgtgctcagcggtggtagcagcatgtaccctggtctgccctctcgtttggagaaggagttgaagcagctctggctcacccgggtactgggcggcgacccagagcgtctgaacgtacgtcgaagagaacccgacaattaccaatataacatggctaatgattttccagaaattcaaggtccgcatcgaagatcccccgcgtcggagacacatggtgttcctgggtggtgccgtgctcgccaacttggttagtctcgtttcttttcctttgaccccggccctgctaacactattttcctcagattgccgacaaggacgacatgtgggtgagcaagcaggagtgggcggaacagggtgcacgcgccctggacaagctcggcccgcgatgaatggattttatttaggcggttcctggtctgctccttttttctctgatttcctgcttcgcattgtttgcaagccatattgcctgggtcttttttccctattctcgtttccttctttgcctccaccttccccccatcattgtcgatacactcccgtccatcttgtagtttcccctgtctcttcgcctgcttcctacattgtgcctagactggtctggcgcgggtggattcagggcgttcatggtagaaaagaacgaaatatttctatcggcttttctttgtataccagctttgtaggttatctacgtataactatggtgggacttatgatcatggttgcatacagtctatcgtcaacatcagtataaccaagacaaagtcatacccatatgtacctgcttctttcctccgctagaaaatggctaccctattcctgggtagaacgaaacgtgtatataaactcaagaaattcgaaaatgcaaaatgctgcacgcaaaatgctgcacgcaaaacgcaacaaaccaaatgaggactatcacaacagaaggagtaacacaaagagagaaacgaagaccagtcggcaaccaaccccaaactaattctcaatggctcccggcgagaccgccaagataaccgcaagagtagcaataatcagcgaagcagccacaaacgccgtaagtgccacactaccccgactagccgggaacttcccccgaataatccaatactgactctggaagtagcggtggaagccaatcataaggataaggatcgagacgccgatgaaagtggagccgaggggtttacccacgctacgaagacgggcggttgcagaggaggtgtggaggtcggctgaatcgtagcctgacgagtcgaggtacggtggaaggatgcctgcgtgtaagccggatgctgggtcgaagaagttggtttttgtctttgtggaggcgctgttcaggcggaagagttgcgttactgcgatgccgattgaggcgaaggctagggaggtgcgcatccaggctaggaaggttcgttctgttggaaagggggtgggtgtcaggggtgtctatgcatgttttaaatataggctgcgtgtgcatattgtacctaatgcgaggtggtcgcgggccacactgcctttgttctctagctcgagactgccgtatcgatctgcgaatcgactataccaggactgatggggctcgggggccgagtcttgggtggttgattggctggcattgccagggttcgcgttgtttaattggtctttgagctgggaggcgtctgcttgctctgtagactgataattgcgccccgcgggaccggctgtgttgattggggtagattcggtggattggtatgatgtctgaggttggttctggttacgctcgtggtttcgggtcgaggagcttgagtgggaccgggtgctgctggaggaggatgacagagctgaatctgtgggcgagcgtgacgatgagtggctgtttttggctcccccagaggtgctggagcctctcagaggcggcgccaatgagtcggatgtattcattatgcctgtccgcgtgtttttgtgtcactgaagagagtattgtgcaatccacgatcgccagggaccgagtttatgcaggtctgaagcgccggttcgtctatgtcaatagaggatgaaaagttgctgtttgagacaagatggtcacggtgatggagagcaatagttgtgtctgttatgctggactcttactatctgcatttcctttttctgctctcttctccaattgcatcaagtataatgtcacttcgagcaaaagcacgcaaggtgatgatctcccatccacgtgaccaatccggggaagcgatcacatgctccactctaacccacctgggtgaacccttagtccgaagtgtcgatgcaacttgtcaagcttgacatgctgatatggacatccaatgtagatatttacttctagtcaaccatttactctgatcttcatatcttattttacaagctaacacctcattatcttacccgtctggtaaagtgcgtcatcctctgtttaaggcaggcggtcagtcctgcttcatccctttatcaacttatcgacttatcgatttccgctcccctcactcaaccaacacaatggcgtcacaggcacctttaccatctcctacggggaaggtcgatctctcgaaaaagctctctgagttacggtcaaatagccgaaggggaaaccccagttcccgagatctgactccagcaacccctcctctcccttcgccgcccgacctctccggccaccagtaccagcaaccaatccgccgcatcctatcttctaaagaccatgagctcttcctcgcatcgccgacctataaacttgtcctcgcctttatattcgggctaactgattctgtgcgggggcattctatcccggacctccagaaaaagcctcaatccgaatccatctccaaggtcctctcagtcatcactcaaatacgcgccctcctagccaaaaacccgccaattgaccagggtggatcccgattcggcaaccccgccttccgagcattgtgcgacgatgtaagcgcccagagcgcatcatggcacaccaacattctggggttgaaagactctggcgcaatcgaagaagcgtcgacatatttaatccactgcctgggctcacgggagcggattgactacggctccggccatgaactcaacttcatgatgtggctgctatgcctgtaccagctaggtcttctccccgccagcgacttccccgctgtcgtgatcaaggtctatgtcgagtacatgcatctcatgcgcgagatccagtcagcttactacctcgagcctgctggatcgcacggtgtctggggtctggatgactaccatttcctgccgttcttgttcggagctagccagcttgtcgggcacccgtatattactccgctgggtattcataacacagctactttagatgaagagggtgataactatctctatctggatcaggtccgatgggttgagagtgtcaaattggtgaagggactgcgttggcatagcccaatgctggacgatatctctggttctaagaattgggccaaggttgagagcggcatgaagaagatgttcgttaaggaagtgctgggaaaacttcctattatgcaacatttcttgttcggaagtcttatacctgctgccgaaggcatgaccgattcttctgagagagatgctgagcatgagcatgcccatggccacgaccatcctcacgagagttcagactggttcggtgactgctgcggcatcaaggtacccagtaccgtggctgcgggcgctgagatgcgtaagcgtatgggcggcggatcggacctgcgcccaattcctttcgattaaggtcgccgatgggaagttggaagttggcatgccaacaaaataatgaatcaagatgactagcatattagaaaatgcaaaatgattatctccatgtgcttcagtcaatcgagtaatttgcttctactcctacctactgccgtatgtacctctgtatactccgctccgtatacaagagctcttttccggttagaatcaacgacaaagtacattactcccagtatggaacatatggtgagacttttgcctgatttaccatcataccatcactcttagttattagtgttattagtctaccttgggaagtttagcaaaaccctagactcggcaatgcagaagcttccccgcacggagatctatagaccacgaactactcatctcggcgattttgcggacttgatcaacagaaatagtcgacatccatcaacttcgcttctcggtgatttcacgggctacaagaactataatcggaaacaagcactcggttattcaatagaccgcggttgagacaaaccatgatataaccccatttctgtctaatgtaccaacaatcctcgaacagctctcacatttatctacatcaaaaacatgtcaacccagtctcgagctcctgcatccgctgagtctggaacatttactcagcttgggacattgccgaatacatacacttccgacatcagcctgcagcgaatgctaggatgtaagtccagcgtggggaccacctttgttcaatctaacctgaagacaataaatagggtatcttcctgcagagactctcaagttagttgaaccccatctcgcacaatttggcgaggaggctgtttcgccccaaatctttgcatggaacgccgacgcagagaccaacctgccatatgtcaagaagtacaatgtctggggccagcggtatgggtatgacaaactgattacgactgatgggtggaagcagttaggaaaatggggggcgaaacatgggttagtcgttctcttttttgatatacatttgacgctaatacgaaatgtttagggttgtttcgctgggctatgaccacacatacggtgttcatagacgcactgttcaatatgctgcgtatgttataattccttgttctttcccgaactgctactaactaccggacctaaagagtgtatatatacgtcccgtcgtcgtccatgtacagatgtccgatgagcatgtccgacggagcggcatttatattatcacagcgtctcaaggatctgccaaatgatcatattctgcacactgtatttcggaaactgacctccagaggagacgactactggacatccggccaatggatgacagaacgagcaggcgggagcgacgttcaaaacacagagacatgggcgacctacgcaccattaccacaagcatcgaaaacatccgacgtcctcgccgagggcgactatttgatcagcggattcaaattcttttcttccgcgacagacgccaatgtcgcttttctcttagccaagacagattccggcaaactgagcacatttatcgcgccattacggaagacatctatcggagcagatggaaagccagaagaagtatctaatggcgtgcgcatccaccgcctgaagaacaagcttggtaccaaggaactacccacggctgaactggaactaaagggcatgcgcgctcacctagtcggcgaaatcgatcagggcattgtgactattgcgccactattgaataccacccgtatccagacgcttcttggaacattatcaacctggcgtcgtgcgattagcattacaaagaatttcgccaagtcacggactaccgtcggcgagccattgtggttgattccgatgcatctgcgcctccttgcggacgtggaggtaaagcatcgcggcgctataaatctcaccttcttcacaattgccgtgatgggtctgattgagaatccatccagctctgcgagacatgcacatatgcctcaggatctaagcgaagcaaaggtcatcttccgcgtcctcaccgccacatgcaaaggcgttgtcagcaagatgtcgatggtaggcgttcaagagtgccaggaagcgatgggtggagtcggatacattgacgaaccagacgagcctgagttcaatatctcgcgcctcctccgtagtgcagccgtgtatccgatctgggagggtacgacgaatgtcctggctagcgagctcgttcgctttttgatgaaaaatgataacctgtctgttttgtcggggtggctcagtcgcgtgttgtctttgatccgcacgtcgtctctcgcgggtgcattgaagcaggctctggcttccttcctttctcgcgtgacatctattcgtccgctggctgcgttgctggctgatgctcgcagggttatgtttacctttggctggattcttgccggggcttttctggctttggatgcggaacgggatggggatgaggccgcgatggaaattgctcgcagatggattctgttgggtgagggtggtgtgggtgagtttgtctaccgggatattgtcaagccgtatcaggcctttgattcggcttccgggagtgatgagcatacgcggttggattgtaagattgcttggggtgttgaattgccgtccagggtggtatttgggcatcgatctttgagcgattcgaaactctagatgtaatcaattggatgaagtgcttggattcaacatattcaacattgaagcagataagtcaggttgtttagcatggtaaagacgctttgagattgcttgatcttatcaacatcccatccaggggtttctaagaaatacaagtgatctcgtcggcctacggccgtcgagatagtcgttgcagagcaaagcgactgattctaacttctaatgctgcgcaaagcccccctcttacttgttacgatccaacgttgccttgctttgcttgtttgcttgtttgcttgtttgcattagctagattgtttgctagatagtttcgcgagatgattcgaagtttacattgtttacaaagcggtcaggacacagctataagaactagctgtccgatagcgatccatatggatcgtgacaagaagtttgatagctctaggaaaacttaggaaaggtatggacattatatagatagatggtaaaccaatacgtttggttgccttctgtgctgctttcattggagatatgccccagcaacaagataatgctgggtttcggaggcagacagcgacgcgtggatgtcgaaaatatctggtcactgagccatctactgccctcagaggcaagctcctatggttcccttatctatttccatcggaaaatatggctgatgttttccttttcttcctgtcatttacgaacgagaagtctgtccccgattatttcgtgtacgaatatgatccacttttgttattctacgtctaactgatcgaatgattgccggcatatggtgacattgtcggagattcgttcaggccggacctcgccctcgttataccctcatcattccttatcacaccctcgtcgtaccctgatacgattcctcgccctaccggctgggctcacctcacagcccaaggaatatccaggtcgaggaagaggtgtcctagtgccagcaccacgtttgtttggagataaaaactaaggcacatcaatggaggagtgtatatgggcgcttcggattcgggaaatgatccgaatctgaatatatgcgtctacaagggtggaagcatggatcaacgcatgtatatacctcgggaaacagaatacttttaagcataataataccttcctaatactcgcataatactaggcaatgtagcgaatacgggaccaatcctgactgaatacttgaagaatactacattttgagccaaatactcgtagaatacgtattatgctagaacaacggtaggatgtgtaggaatttgggaatacgttttcgggccgcaatactggattatgaccgtcatactaccggtattcaaatctaaagacacccctggatggtctacatactagttagatgctgacagaccgagatctggagatctctacagaccttgcgtactccagacataacgtgccatgttggcgaggctctctttgcctagtcgaatatcagcctctctggggatctcaggggcccgtccgaaaatgtggtcgaatggaattgtgatcgggtgctgcgagactgtgacgttgttcggtgcttttccaatcacgcaggattgcgtgacccttgggcgttgggcaccggcgtcccattcccacttatcgagtttgagctcaggtttcttccggttgactttgatggtgatggccgttttcacttggcctctgagggggtcgacccacatgcttgcgtcgtcgcgcaatttggtttcagtctcggaaacaccgacctcgaggaccaccccgggtcgtctgggggcaccacgagggggccgaagtgggccccagccccagtctggccgcttcacgtttccgtcgccgacgttgacattcacgttaccgaatccttcaactgcatcacagagtcccataggtagcaagatttttgtgaattcggtttgcagtccataggaaacttgagcatgctcgggggtggacattctgaggatcagggcgtgcaaggccgcgttgtagaataaactggtaccagcgagtagatcagagagcagaaagtcttgctcgaaggttgatggatcgatgaaaataacgaagtagtctgagatttcggacccgagtggttgacgagggggtaatttgtgcagacggtgcttttcattttgtaggatttgatcgaattgctctttccctttataggtgtatttgtttgtcgaaggaggcaggttgtccagaaagcgctccacatcactttcccattgagatccagccattatgaattatttctttcagtatttatttcctacgagtgtttagaagaaaaagtagataaagatgagaaaaaaggtctattaaatgaatcggagttacctcagaatgagcgcatagtatatccatcttgatatatagttgtattcaactcgccaccgcctctgattggccgaattcccaaatcgcaacagaagaacatcgagaacctacattttcaaccaacaacacacccaagccaaatattacaatccactcagtcgaacatcgcactgcaatctaaaaaaaagaagcaaacccctcatatctacgccaacacacaaaaccgatcgcccactccccacctcttactccgcacgccgcgcacgccgcacacgcccatctcccctggacccaacacctctacaagcggcacgccacacgaaaaggaggtagcctggatagtcgcgacctacggcattgcatccccgaacctaacccagcaccgcgagcatggcgggcgacgagtactccgtcggcgggggcaagctcaagctgaaggggagtaaagtcagcggagggcggatagagaagaaaaagaagaagagcgggaagaaaaaggagggggaagcgacgacgcccaagccggagtcgacgccagatacgaagcggccggaaaacgaaacagaggacggtgtgaggtctgaggaggatagagagaaagagagggatgcgcctgggaagactgaggccgagaagagagcggaggaggttaggcgcaaacgggtatgttctgttgttcttttttgtctttttgttgggcttgcgctctttctgcttcggctttgttgtacggggaaactgactttttgggacagttgcatgagcggcttcagcgcgaaggtgtcaaaactcataaggagcgtgtggaggagttgaataagtatcttagtcggctgagtgagcatcatgatatgtacgtcttgctctttttacctttgttgtttggataagctgacattttacataggccgaagattggaccgggctaaatggttatacggtttcacatgggtttcgatgcgatcaatctgttattcaagaataccatatctgtactattcaatacattctgttcaactgtactccgtaaggctgccatgtttcagtgatgatccataatccaggatactccactggagtataacgtaatcggtaagcgagtggccactgtaagcgagtggccaccccacccaagaggatannnnnnnnnnnnnnnnnnnnnnnnnnnnnnnnnnnnnnnnnnnnnnnnnnnnnnnnnnnnnnnnnnnnnnnnnnnnnnnnnnnnnnnnnnnnnnnnnnnnnnnnnnnnnnnnnnnnnnnnnnnnnnnnnnnnnnnnnnnnnnnnnnnnnnnnnnnnnnnnnnnnnnnnnnnnnnnnnnnnnnnnnnnnnnnnnnnnnnnnnnnnnnnnnnnnnnnnnnnnnnnnnnnnnnnnnnnnnnnnnnnnnnnnnnnnnnnnnnnnnnnnnnnnnnnnnnnnnnnnnnnnnnnnnnnnnnnnnnnnnnnnnnnnnnnnnnnnnnnnnnnnnnnnnnnnnnnnnnnnnnnnnnnnnnnnnnnnnnnnnnnnnnnnnnnnnnnnnnnnnnnnnnnnnnnnnnnnnnnnnnnnnnnnnnnnnnnnnnnnnnnnnnnnnnnnnnnnnnnnnnnnnnnnnnnnnnnnnnnnnnnnnnnnnnnnnnnnnnnnnnnnnnnnnnnnnnnnnnnnnnnnnnnnnnnnnnnnnnnnnnnnnnnnnnnnnnnnnnnnnnnnnnnnnnnnnnnnnnnnnnnnnnnnnnnnnnnnnnnnnnnnnnnnnnnnnnnnnnnnnnnnnnnnnnnnnnnnnnnnnnnnnnnnnnnnnnnnnnnnnnnnnnnnnnnnnnnnnnnnnnnnnnnnnnnnnnnnnnnttaaaaaactatcattcaatttgggattgacccagacgatatttataacttcgatgagactggatttgcaatgggattaactgtaacggcaaaggttataataagaagtgaatactacggtcggagatcacttttacaacctggaaatcgcgagtaggtaactgcaattgaatgtataaacgcggcgggataggtcctccctctgtgtattattttcaaaggcaaggtcttccttaaatcatggttcgaaggccttcctagtaactagcgctttaaagttagtccaaataggtggatatcagatgaaattggacttcgctggctttagaaactctttatactattaacttcattgtgtatagtaggaaggtatcgacttttggtactcgatagccatggaagccatttaacccctcaattcgattaaatttgtgaggaaaacgatattataccaatttgtataccactgtattcctcttaccttttacaacctctcgatatcggttgttttgcggtagtaaaacggtcgtacggccggttggttgagatgaaaatgcggaccgggatcaactatattaataaacttgaattcctcgaagcatacccctccgcacgaattgaagcttttaaatcggagacgattaaaaatagcttctcagtagccggtttaatacctttttcacccaatcgggtactttcaaaactcaatatttatcttcgaacgccaaccccccccctaagccggggtagcgatttaagccggaatttcaccccaaaaaccccttttaatagcaaagatctacgtcgacaggctttgtctattaaagctttacttcgaacccaatctcgaagcctaataagcccttctaaacgtgcattaaaccaacttatcaaaggctgcgagcttgcaatgcatagcgctattttactagcgaaagaaaacaaggatttacgggatgaaaatgagaataagaagcaaaagcgggcccgatctagacggcagatacccgccgaagaaggcctctcagttcaagaagcttctgaaatcattgctaggctggtggaagcattagaaatacccctacaccccccgggcggaagcactcaatcagggttagaaccacgaccacgggctgcaccaaggtgtagtgggtgtggaaagacagggcataagatcaataggtgtccagataaatgatcttttttagtttaattaatttaatggcgttctggttgaaatatttaccttagaaaactatactcttgggtagggtggccactcgcttacagtggccactcccttaccgattacgnnnnnnnnnnnnnnnnnnnnnnnnnnnnnnnnnnnnnnnnnnnnnnnnnnnnnnnnnnnnnnnnnnnnnnnnnnnnnnnnnnnnnnnnnnnnnnnnnnnnnnnnnnnnnnnnnnnnnnnnnnnnnnnnnnnnnnnnnnnnnnnnnnnnnnnnnnnnnnnnnnnnnnnnnnnnnnnnnnnnnnnnnnnnnnnnnnnnnnnnnnnnnnnnnnnnnnnnnnnnnnnnnnnnnnnnnnnnnnnnnnnnnnnnnnnnnnnnnnnnnnnnnnnnnnnnnnnnnnnnnnnnnnnnnnnnnnnnnnnnnnnnnnnttacagggcccactcgcttaccgattacgttatatcatgtgataataaggggctcaagattcaataatatgtatagttcatggctaaaatgaccccaaagagctctatttagcagtccccgaaaagtgaagaggtatgcccaaaatgcgaaagaataaataaatgataaatatcaaaagatcaaagaaaagatgtcaacaccaagcacaacgccatgcaaatgaattccgcaaaggctcaacccaaaataagccgcggccaaaaaccgagtccgatctagatatagatcacgaataaccgaacaaaatagaagaggagaccaagcccaagaatcgaatcagagaagagggaaaagaaacaccgcgctaaatccagaatcaccgcagaggcgcacaagaaagggaagaaccggatcaaatgggaccgaatcgaagccaagccaaggctagcagggatagcacctgatcggccgggggcagataagaacagataggggggaaagaggaggcgagatgggtccgagcctccatagactaggcgggcgatccttaagaataatggcgccatccgcgcccccctttgtccttccagccgagagaaaagcgacgaaaggatcggctatttctcatttctgattgtggttcccggtctcatacgcccttgacaacgacggtgcgttcgctgttcagcttgtcggcatttcgagcgtgtgattctttcttgcagtcctccaggccggtgcaggagtgggcttctagcatgcggtgcttggagcagaagtggccggtacagaagctgcagtcgccgacgatgcgctgggcggcttccttgcactccttgaagttgcaacggggcttgcggggaggcattgtggttgggagtgttggggtagatagagcggttgagaggttgaatgtaaaagtgtcctttcgcgaaagacgaaagacaagagataaataggagtagcgaaggcgagacgctggggagaaggtttgagataagcgccggtttcaagtgcggaggcgagcgggggaggagagactctgtcgaagaaagtagtaaaagggggagggagggaaagatgggccagcacgaccagcctatatatagggtaaatcggaagacacgggagaaagccaaagaaaccgacttccaaggttctaaccagagacgggggggctgactcagtgaggcgacagtgacggaatcaacgagtggagttccaaagttctgttgttggcgatttggggatttccaagtggattcgggtgggttttagtggttttagtggatttggcattcaatcgattatttcgaattaattggatttgatattggaattggaggttagcggttatttagtgcagtgaggtgattgaactatacctgtctatctatgttgtatagttacagagttttaaagtattcaatattgatcttctcctttcttcttctttctttttttctttttcttttttccttttctttgactttaccaaattcctctgcatcccacgcggacgtatcacccaggcgcctggtctcgggcccaatgatcggaatgtggaattgcccgtgcatccaagggcgcctttcacgtgatagtccagtcaggtgtcgcaaactaatatagaaagtctcaactcaaccaactcaaccgatgcgatctcagatcctgtttgcgccaccagagtggcaaggtgttcacccagacttctccgactatggtactccaggcacctccattaccaactatatcatcccgaatataactacaatcagtgcctaacgacactactcccactcaatgcaatgcaaacaaaaaaccatgcaagtcgaccaaaagagctctgacctcgagataaaatagacgagtcgtctgagccaagcccggcctaggtacgacggatgatccgcgtggagctattgcataaccagcatcggtactccgtaacagcatatgcagaggtatggagtaggtacggagttggtgagactaagagaggaggtgatgccctataactactccgtatactccgtacatttcccggtttaggcctaaagtgagggccgatcccgctacccaatttcaccgtctcctctcctctccacatctccccaccgtcgctcaacgtagcaggacgctacgccgtatctgctcacggatccctcgctgataacacgctagacggtacaaatcagaatcctaccacgttggcgtgctctacacgggccacggcctacgtggtcatggtcaatttaaaatagtgactagcgtgcagcgggattggtttcatgatatttatccactggtaaggttggacaagggaaaaagaaaagggaaacgtaaatgtgaatcaaaaacccgtggacgccggcgcagacgccgatgatacgctcaaacccccttgcccggcccaaatcgcaaaaggtaaaaacggaaaaaaggaaaaaagggcgaggaatcaaatcgcagcatcgcatatcgcatatctcatatcagactccgagctcgtttgccttgcctgcatccgggtccaagtagtcctctcgctccgctgcctcgtactcgccgatcagatccatcacaaccgcccgtgcctcgtcaaattcgccaagtccgtcagcaaacggagcttccttcttgtaggaatccaagaacgcatttcgcttgcggagcatgtcgtagtgcttcacaatgcgcttgaagagtgtcgcgacagaggtgtggttggccagcatcagcccgctgacgcgatgtccggtttcctcaatatacggcgatttctttgtgagagccacctggatactggcagggccccaggggatgaaggtagcgaggcgacgctcccggatgcgcaggagtgacttgtgcacgtcggtcgggtcggcttcgccctggatgatgttgaggatgctgatgtagcagctggacttgctggggttgaccgagaccatgcggttcttaggctgtagaagacggcgcatgacgtctaggacggtggtctttcgcaccgtcctggcttgctcgatgttggcgcccgtgaacggtgtgtatgatgtgagaaggaagtggctgcgtggcgtggggatgagcgaggcgatgatcccggcgagatcgttgtgcatgtatccagggtatcggagcgtggttgtagatgcagacatcaccgtagaaacgagttggttggtttggtggaacgagggctcttggacgtgcagccgatcagcgacaattcgtgacagagcgccattgtccaggacgaccacggagtcggcatcctgggtcaatcggcgcatggccagcaagctgttgtaagggttgacgacgacatcggactgcgtgtccgggaagacagagtaggtttgaatgagtttcttcgggaatcgatcgttcatgcgttcgaggatgaaactacccagtccagagcctgttcctcctgcgatcgaatgtagaagcataaaaccctctagtgagtcacttccgtctgcttcgcggtcaatcatatcgaaaatctcctcttgcacgccctcgcctgcagcatatccggtaccccaattgtttccagctccgataccttgttgtccgacgaagaagttctcggggttgtagatattcttgtaggggccagtctggatggcgttgaggacctggaacaatatgcgttaatcatcgtggtcgatttgatatatcggtgaggcctaccctgggttctaagtcgaggagaatcgctcgagggatgtaccttgtgtcgtcactctgccatatgttagccagtgttcttgtccaccaagcctatattttcctcgcaagcttcctatacacacctggtagaagaagacatccttgcgatcaccggccgccccgtcagtcgcatgctcctccaggtttccatctgcgctgatcccgtgctcctggcacagctgctgccagaactggctgccaactagatagaacgaatgttagacgtgaactatagtttctcgtgctccgtttcaaatgactagatcaacgatcgtggaatggatcgcagagttgagccacataccgttgttgccgcactggccggcttggattgtgatgatttctctgcaattgccaccaatatcagcatcggtattcaagctggagagagacctctcaattatgcttgactcggaagaatgaacaaaccttggcatcttttcttcacagaagccgtcgagtgttgctgctcgttaacgcgtatcgcgtccacgcggggaactttttggccgatattgccgcctcaggcagaagctcttgccaccttatgtggacatcaacaacgttacaaaggcctgcaaataaataaattcgcgcaagaatgagagttgattatccgaaatataaatgctttttaatccgcccagctatgctaaaattttgatataaccgtcttccctaagtggtctacttggccaaccgttgccctggaccactagaatcctgccttcaatgctgtgatgaggttgccagcaccggcaaccaccccgtcgacaatccgtacacgtcggccttctgtatctccgtattcctgagtacagccctcccgtaccgcttcctccatgccagccataccagcacagcccagacacacaaccttaacatgagattccgagttgcgaagcaggttgcgggtggcatcgatgatccgccggcgcacctcctccggctccgtggtgtgcagctcaacggctgtcaggccggtggtctcaacacccgcaaagtgtatagagctcccgtcctcgaagtcgtaacccagcgctccctggactgcattggtgagctcctccttccacgcagagccagtggtgacaatgccaaagctgcccttcccttggtacttgtgtagcctctctgctgggttgattggatctctcaacgtgaacccactaaccaaggagagcgcagcggtgagggatgcttcaaagattccagtgacatatctatttctcgtcgagctcgtttcttcgcttgccgtgatgtcctccctgagtctgccgacgaatggatgcgcggagtaacacgctacgagaaaagcgtcgtaattgccgataaactcccgtacgggccagcaattcaatgccgatttgcacgattcttcggcgttattgatgctggcgattggctcgatctcgactccgtcgatatccagggtggagtctggagcagtgaagtattcgaagtgcacgtcttggtagttcatgctggccaatataggcttcaggccttcggtcatatgcgttgaggtattggggttgatgatcaatatgctgtaatcccgttccccttttctcggatccagctggatgatctcgtttgcgccatatcgcggctcgagaatgggactcatttttccaagaatgaggtgaattgaatacacttggctggaaagacaactccttgctctccgggaaaaaaatgtccgcggagaccgcaaacagctccgttatcggttatcggaccctccacaaccccaccatctcctaggagcttagcggactacttctccaaaagtcaatggcttatttatgcaatatgcttcgtggcttcggctattacatgccgaacgagctaattttcttatctaccctctcaaggaatttattcgttccaaggttatcaatcgaaatggcttacaaatccaattgtgccaccagccctccggctctagcactagtataagaaccactccacccagcaaccccgccgtcctcgcacgccatcctaccttcaacacacctcacctacgcagaggaaatttcaattcccatcatgcctctgatcgcacagcaactccagccgagagtgattctcgggttgatgacctttggcccaaccgaggccaaggatgctcgtatcacgtcactggatgagttcaataaatgcctggactacttccagcagcaagggttcaatgaggttgacaccgctcgtatctacatcggcggcgaacaggaggcattcacggccaaggcgaactggaagtcgcgtggactaactctggccacgaaatggtacccaaatcagcccggcttccacaagccggaggtcgtccgtgagaatttggagctttctctgaaggagttgcagaccgatgtggtcgacattttctatctgcatgcagcagatcgtgccactcctttcgctgaaactctggaggctgttaaccagctgcacaaggagggcaagttcgtacagtttggtctgagcaactttacagcctttgaagtggccgaaatttgcgtcctttgtgctgaaagaggatgggtccgtccaacagtctaccaggccatgtataacgctattagtaggtggtgtcctttctcttgttttcggtcatggccactcggctgacagagtgatagcacgtaacatcgagactgaactcgttcctgcctgccaccggtacggtcttgatatcgttgtctacaacccactggctggtggtattctctccggaaaatacaagtcgcaagatatccctgcggaaggcagatacagcgacgcgggctctgcgggacccagatatcgcaaacgttacttcagagatgccactttcgaagctttgagtatcattgagcctgtcgtagagaaacatggtctcacacttgtcgagacggctttacgctggatccgccatcactctgctctgagaatggataatggcggtcgggatggagtcttggtgggagtcagcagcttcgagcagcttaagactaatctcgccgatctccagaagggaccgctcccagaagaggttgtgcaggctttggaccaggcttggttggttgccaaggccacttctcccaattactggcatctagatctcaagtatacttatgatactcagaaggcggtgtttgggcctaagtgagagaaaagggaatgttaagattttccacaaggtccttatatgaatagtacatagttagtgagcaccaatgagaattcgaggaacttggatgctacccaatgagcttcatcgtcctttaaagatcggagatggactaagaccaaacatttgacaatcgtggtcagattcttcatcgttgggcaatatatcttaatacatatcgcatcgcaaacgaattcgcagaccacgtcttctggtctaatccaggggcattgcctgcctccaaatccaaaaatagccgaatgacatgcattcgctaactcgaatccggcatagcgtgcgccacgatcgaaatcatgtgatctggtcagatccagtgatgatgacacctgaaagcggtcatttcgatccgcctcatcggattcttgaccatcttcaccccgagtactctcttgatgcaccttgattatttacgatgcaataatccctactcagtggattgaacccactattcgagctacaactatccctgatcggtgccgagtcgcatatccgaggttgtgcagcatctattgaacacgtggaataggcttcatgggtaaccttttctgaaataaatctaccctcgttatctgcatcatctggatggtggccttccaatagtccacgcattggctccttatacctatatctcgccggcacagtaaatcggacaagaacacccctgacggcggtattcatgtcgaggtagttaggccgactagcaccttccctcaccatcgccgttgtggcttcggatagctttgagctctcagagccgcgggtgacctcaaccccggacgcagtccacgactccgactctgacgacgaaatggttgtcaatcgccccccattacaccgtccaaccgacggccgctcgcaacagcccctcctcaaagatgaccgtcctcgctcccgcccgcgctcgagcttcggtaattatgacacagaaggccagcccatgctgcatgaatcacgaaggccgacaattcggagtaaaagtccggaacgcgacgctgccctggcaacccgcaagaaatatatggttgcatcggggttcctggtgctgagtctgattagcttcgtggtccaaacggagaccgcttcatacattcaaaatgagttgcattggaagaagccgtattgcatgctgtaagtccgagcgcaaagatagcgacaagcccatgcggaacctcttttccggaatgtaatcgcttaccatttcctttccctatgcagctatatgacccacggatcgtggtccttgctctggctggtccagctgggtatccttcggatacagaaacggaagctcacgtgggatgttttctggcggcgccatgtctttttccttcgtaccactgcgcagatggtagaatcgcaggaagtacatctgagtactcgcgcgtccaatcaatcgccggtccgctatatgctgaagaccaccgcctttgtgactactgctctcaccgtcgctggaggatcatggtacgtggcagtcaacatgaccactcccagcgaccttacggcgatctataactgctcggcgttcttcgcatatgccttttcgattccgctattgaaggagaaactccgaattgacaaggtcttttccgtggccgtggctaccatcggcgtcatggtcgttgcctatggggatgggcctcataagaaggtcccgaaaggaggcacagatggcaacgggggacagaaccgattggtcggaaacattgttatcggcgttggaagtattctctatggcctttacgaggttctctataaacgctttgcctgtcctccggaaggtaccagctctggccggggtacgatctttgccaatacttttggcagtctaataggggctttcaccctgttggtactatggatcccattaccatttctgcactggacaggatgggagacatttgaatggccgactggcgaagcagcatggatgctgctcatttccgtgggtgccaatgctagtaagtaccacaccagcgttcaaagcagacacagaagctaacactaagatagcgttctcgggctctttccttgtgctcatctccctcacatcgcccgtcctatcctcagtcgccgcgctccttactattttcctcgtcgctctggtggactggttccgaactgggaactcactttctctagcctcgattattggaggcgtcttgattacggtggcatttttcatgctgagcatcagcacgtatagagagatgaatgaggagcggaagaagcatctagagaacgatgagatcgagtctgacagtgatgcatagatggatccacggaggtgtgcttcgggatgttttggcatacagcattgaattagtattcagcgtttctgacgtataaacttctaatcttttcacacgctatacttgcttcaagccctgtagatgcgcttaaacttcggccctataattggggctgccccagattagttccatggttcagtgttcgatgtatcgacaaagacccaactgtgacatcatgaaatttattccgatcattcaactcgggtatgtccgagtgagtttttctttacatcgagccttggaaggcagatgcgtttcccgtggatatggatatcggcatcccgcacctccggactttaagattaatgcaacgtactcgcatatatacttagccattgtatgatggcgaatcagatccacagcgcaaattaatattcaatgatcatcgtgatagtcccggtgcttataatgtatttatacatatagagttcttctgaatgtaaattactccgtcgtgcagtaaaatcaagaaaaacggtgagcaacaagcgcgagctgctcgacaagtcagcttttaaaggcgtggtatagatgcatatgcaggccatttcgagatccaaagccaggatcagccgccccaattgatttcgcgatgatcagccacacgatgcaattgcaggtccgtccccgtcaaagctgtcattgttattgggctaaacaaagaaactggtccaccgaacgctagggggggataatgtctcacagcgccaggggagtccgtttgtccgtttgtcttggaagtaattttcaccccctgttaaatggcgctaagatatgtctggcgccactatttatatccgatctgcctccacagccaagacaagcgatggagagtgcaagctcggtttcgactctggcaatctcctggcattcacagaggaaatatgacttcggttagacaatccacgagcaattcatgttcatgcattcgttttcaaggcccggccctggctcggcattcaacaccgctcccccgacaatataatccccttgacttgcagcccccccagcgtggcgcactatccatccgggacccaccaggtcaagcgagatttggatggtcacttagaccaagtgattggcagtgacaatatccacttcgtttttctccggatgcgccgccctgttgattggtgccttgaggaccccaggattgaaatacctaggtgccttgattacaggaacggtataaagtacggtggatgcgagttgaaccacttttcacgggagcaccgctaaccttggacttgatacgggtatggtggcaactacggagtaagtcatgacgtcctctacttgaagatttgaagatattattcaaagtgaatagtaatagttatagcgaaaagttacattcctcagagacagccctgtccttttgacagatgtcaccgaaatgtcttacctgcatactgtattattccttcatatcactaaagcagggttaatttaccctggcttgcgtctaggcaactcctaaccatcaaccataacttcgtatgtaatctcatcgctccaataatcggcggtgattggtttgccccccggatggcaacgggtgataccgtgtatggtaagtaacttacagctccagattcgcatctaggtttcccccctcccggatttgttgttctctttggcttcttcctcttcaacctctctacgaccaccttttccaccctcccctctttggccttcgtcgtggccgtccgttcattttccatacttttggataccggtggtcgcttcaatttgatttcactcgttccttttctgcctggcgcggattcaatgaccctccaaggtgcttgagcttgacctccagattcctagcctttctcttgctgaagggaaatcggtctggaggtcttgagcccatctggatcttattgggctttcgtcgtcactccgctaaatttctttattaccgcaccttttttttattttatttttctctcctcttggaatcatggcttcgatttcacttcctccgcagtcccaggcgggcttctcgccacatttcgatacttcgaaccactccaacaatcccgatcccgatcgtcaccaacacatgcacgcaccattgcctaatcccccattcgtttttccagcacgggaccccgatgcccccacccaatcaaacccccctgagcgccgggaacgagccgcattgcccgcattctcttttaatcccggatcggaagagcagtccccacacctttcagcgccctgtttatcgaatcctcgcgcgggtggacaccgtcggcgaccgagtgagtttgttggagacttcttggtaacaccggaatcagttggaccaggtcacaggcgggcggcttcgatggcagatcaacatattccacccccaggaccgggggttggtagagttcctggacgacggaaccatgcccatcgccgttcggccgccatatctaatgtcgacttgaattccatcaccaaggcgcttggtcctaattctgggacaccaagtgcgccttttacacccgccgaacctaaccaccaatctccatccgatcttccttcccgaacgctctctcaatccgctattactctcggtcgtcccacgccgcctgcgtctccacaattccctcccgttcctcctgtaccttccattccggtttccattcaagtggaaatggccttggacaaccagaattcgaatgccgaacgaccagtctctaccgtttcgcatggtatctccgatattgctacaactaagtcacaacaggtggagacgccgactctctcagatcaggtaacaccaagacccgattacgaccgaaaacctcgaccaaaaaccgcggatgcctcttttgtcatggattttatgcagatggatgacgactccggatctatcaaacgttcgcactcagccgctgggcactcccgctctcgaaagagcaaatcaacaccgcatctcgattctactctctcgcccgatgatattcaatccgcagaccactaccggccttcattttctgacactggttccgacacatctggcgatgaagcaactgagcattcgtccgacaacaaatcccctgtcaagtcgaaaaagaagaagcagaaacgggttcgctcttgggccggtcacattctgactcgatccaagagcaagggtaagggtaagcgccatccaaaggttcacacagaggaggagccgcctgtacctcgcgctccagcacctcgtccacctgctcttactcggaccgtctcgggcactggatcggttttagatgttgattttgataatgacgtcgttgtcatccggactccgaccaatccaacgatgccttcttctgcgcttcagcccattcaaaataacgataccgatggttgttctttgcctgcgcagtctctagagagctcatggaaaccgaggagtttctatgaacaggatgttggctcccacgacaatgtactaagtagccctgtcatcgacctcgatgctgcgcttggtcctttcaacactccagatatgcgacaaactactcagggtgcgcccaacaacaacttctcagttgcgacacagcggatgtacagtggcggaagacgaggtgaatttgtcggcccagagatgcggtaccatcggcgcacggaaagtgcaccggcgcttcaaccatttgaccgcactgctctcggcgcattccgtctgggtccgactccggcggtcgaaacgcccgatgtatttgacgaggaggaagaggatgctttcttggctgcttcccaatcgcccaagggcgagcggcttccggtgaacgcgtcaccgatcgacaacgcagttttctcatcatcggaggacgactcgaaatctattcacagcaacgctacctctggcagtagtgatactctgactcgtccccccaccggtagcgtctcctctcagaatgctggcttaggcattcgacaaggcgataaacatctgagccaggaacaactggatgacagaagtgtcctcgagcaggtacacaatgccagcaatcctttcgccagcaagcctcgaacccccgtggaaattctaaagatggaagaatctgggcataaattgattggacccccaagtcccgacatttctcctcgattcctagctgtcgacaagcgaccagcaacctcacccatggagttgctgcctagcattccgcccttctctttacaaccagggatttcgccgtctgactcatctttcccgtctccagatgcttcgcggtcaattgcggcatcctcaactgaccggaacttttccagccactcatatcatcagcttccttcggctgaacatccttacgcatcggttgaagatgttccatctttgaccagtagtgcatcgaccatgaccaacactttgaatcgtttctcggcggcttctttctttccccgtgggcgtctttctgatgaccgcgcagcgtccttctcagcttccggtacccgacgcacaagccaggctaatgcctccaaacgctctagtctagctagcctttccaagctggtcgtcggtccccattcggagcggagtaagctcaatcaggaggagaaaccccctagcaactcatccgacaaaacgaagaagaagggccgccgtctcagccgaatgatgcacttctggaaacctaaggacaaagaaaagtcatccaatgaggcggcaccagcaaacgaacggtcgcagtcataggcgcgcgttgcgtattggttttgatatttttttttcgatttacggcgcaacctcggcatagcgacatcctggcaattatttttgagacatcacttcactccccttttcttccttgcccgcttgcgatagcgtgggcgtcttctttcacccgatttgtacatattttattcggttcagctttactgtggattctttttcttcatcttcattggcggttctatttctgcgtcctccacctagacgctcattacgaatttccttgcctctcaagatgtatgtgtcttgagtatgatctactcttttcttgtcaatccttatgttccggtgtgggtgacgcacggatttattgactctctctacgatcgttgctcctctcaggactttttttaccactttgtttcttttgctcaagggtcttggcctgggatatcattcgtccccattggaacatccattgggtccttctttttccatatctaggacatggctatctgtgtatctattgtgtggctttcgtgtcttccactgttcaggtgtggcattcgtcaagaatttgtctctgtccgattacacagatcgcggataatgaaacactctcttcaattatatgtcatagtttttgtaagattgaatgtttatttcgtaggtttggttttaggacaatttgaaatgttgcaaagcacacgtagccctaaactccaaagatataaatggaaaccactacataatcggaaggatgtgacgacatatatacaaggagatgatgctgtgatttttcaatatatattgaacatcggatatatcccttcccttaatgatctgaatccctcaaaggacacagtttgtgcacaatgaatcgaatgaaacatatcttacctcactttcgagcagatgggcacattatcgtgatcgtcccaaaggatttgatatagttattgctggtgacttatcccttgtaggagtagtagtataaagtaccttttgtagaagctcatggagttaaatatagaaacataggagctgttgatctgatctgattcaaagctagaagatctgttcagctttgtgccatggtcgagtttctagtaaaggctgcaaagaccgggcggtgaatgagtctagttcatttactaaccatctcagtcgttcgaatcacctaggcatcttcatctgttagctttgcaacattctgcatgatcatacgacctggctgtggaggagcttgcaatgccattccaggaccagaatgcgaggctattcggacttccatgttttttttcccttttggcaacctccatgacttggaagttcgcacaaatgatcaccacttcgaagtctcaaattgaagcaaaagctatggcaaagagtcaatatacgaagggagtgcccaggcacaggcctcaaccctggatgcccaggtgcatccaccgtcttacctaagctccacgcgcgggagagcttgcccacgggtggacctgagctctccccccatagagatgtcggatctgcaaccatcttgaagctattcaatacattcatcattcagccagttgaagccgttgaactgctatttttagaccctgctctttggcttcaaactgtgcgcctaaaactacttccagcgactctgctagggttgttgaacttgtcgctttcattctttgcgtctccactaccagtgtttcctacactttgagtgacgtcgattgaattttatgccttttctctgcttgaaatcacgaattgatcgttcacgtcaataaaccaatccagcagcacttgatactcgatctacacgtgtcatagtgaaactcccgttaaacacaatgtctaatggcggtgattcacagagagtgcctatgtcccaagacgaacagtctctttatgttcgcacacaagagtacgcagctacgccgcgatacccaactgtgactagacctattgggcatggcttctacgggggaccagacatgattgacgatgacactgtaatcgtcgaccagaaaattttagaccgcgaatcccacgagtttgcagagggcgactttgtttgcccaggattcttcaacctcgtcgatctaggtgggttcacccgccgcttcaacccctctcaatggaaatacgatatgcgtcgccaggcccagtccatccttccattcttatctcttggcccttcatcatgtctacgtgatcccgaatacatccgcaaccaagagttcacactaattcttgctattcgaaaccggtactctgctcacgcacgcctcgtctcaggcgagaaggcggccgccatggtcggtatcatggcagacacgattgatgttcttgataaccaagagctcatttctgcattcccacgcgctatccgccgcatcaatgatcacctggctggtgtggatgtaggacccaatggaacggggtcagccagctatccgaaaaggaaagtcctcgtcttctgtgaatccgggaatgaacgctccgctgctgtcgtcattgcctatatcatggctatgctcaatgttctgtctgtcgaagccacgcacatgattcaggcgcgtcgtttctgtgtttcaattgaggaaaatatgaaatacatcctcgctactttcgagaccattcttgctgctaagcgtgatgttgagcgtgctaaaaaaatgactgttcatggcgctgcgagtcttgcgccgccatctctgtcgccaacgcttacaaagaagcgaagcttccacgatcagagagatgatgatattgccatggatgagggtgaaatggatatggatgaggatgaggacgccttctatgaccgaaagccgaatgctcccttccaggaccgcgtagtctagggtgagccgaggttgtttgtttcgagtatctttgggatgtgaatggcactgtcattcatggagatggggagggagatggatacgctgaaagatgaaagggaatgaagggaattctttacattgggtagagtagggtgggtatctgcttttctttttatgtctgctttgttgtctgctttattgcttcatggttcttgtgtgcaaatacccagttgcagttgctcattctactatttttccgacatccaggtcattcactggccattgcattcttataactattttcatattcgtaagagcatacacatggcaagaattcagtctagcatacgtctacagatttgtagaaaaatcaatgatggggtcaatatcaaaatctggcaagtctcaagacacgcggaagttgattgccctcaagcatctgacccagcgtttgaactcaccttgtcgattctcgactcaatttgcccctaccttgtgttttcctttcaatctgagagctcgagtctcgcactgattttgcgcgacttcaaagccatcccaattctcccttattctctcttctttcatctcgcgcgacaacctttccatctcacgatcatcccaccacgatcacccatcgcatcctacgatgaagtgcatgcttcacattgacctttagcacgtacctaccatcgatacaccccagctaaccatcaatcgcctcacacctcgtcccccacctcgctcctcgccccaacgcgccgccaaaatgagcagaatgcgactgcgcgacagtatccgcgcgccagtgcgatatggcgaggatgaatacgaagcatcgcgggtctcgctgcgccagggatgcgatgactccattgacgactcgatggagcttggggaaacaggtaaaccgcgcccacaacaggggcgcaagccaaacactgtgccattcaatcccaacctgccacccgctgcgtttcccactttgaacataccacagccaggtcgtggctccaccgtctcagcgcataatcgcggtgttggtggcagccggcagaacgtacacgcaagcgaagctacatctgctttccgcaatgataggtcggtcccgtcgcctccgtctggaaatgaagaactctcgatggacgatatcgacaaccacctcgccagtaacaacatggacaatccggtgtatgcgaggaacgtgaatttggcgcgcatgagtgtggatgcctttccgggttccgaggacattgacatggacatggccacctccccggatagtgatgacgacccactgccagatgcgactcaggtgctccttgatacggtaagtatatcgtgtcttttgctgtgttagtacaattgaacgagtctgatgtgtgtcgttgttttagatcccgaacccaaaatggggtgatctgcacaaggctatgcaagtcgagatcatcgaaaacataatgaagtttcatagctggagacgtgtttgcgaccttcttgggcttgggctagacgaacgaaggcagctcatgattaacataggcatccgcaataaacagatcgaaagggagaatgaaatactggagaaaatgcggcacaaacagcgcagggcgcttatgagaattgataacagcgacttgaagcttttcaagccgccacctcagttggtgctcaaaaggatcacccgagaggcccatcagaacctgttggtcaccggctacacggacctcttgatgtgtcaatcccacgagttcttgaaagccagacagttcctgcatcagcacgggctacctcgaagatatgctggcgattggggagacagcctggtggtgcttcgagaatccggggagcactcccatgagcccgatgagttcgaatggaaagaaaacctgagagtcactccacctcccgatgagaccgaggacataatcaatcctttcatggacccagccagtagggctaagagccaattcattcaaagcattggtatgcacggcacaataaaccccagggatttaatcaaacgcgacactgacccggctcccatcgtcgactggggaaagtattataaacggaagccggacttgtcgtgggacaccacaaagcaccagctaaatggattggtcaaggtgaaggtcggtccacacaacgcggcacggatccaacattgcacggacgccggcgtcgagctccaaggactgtcctcccagacacaggtgaccgccatgccaggatcacttccgcaggggtccctacaagacacaccgtccaaggagccgcggaatgcgagtctcgcccagccctttttcagacgacctgctagacctttcagaagagtcctcaccgactggtcttcgccagttccccaccaatccgagagccaatccaagtatcgtcgagacatacagcaggctaagcttgagaaactagaagcaaaggcagaggggctgcgccgtcgatacaactaccagccaaacctccaggttaagggcgttggagttggaatcagtcccgcacgtggaaccattcagatgatgcccccgatgcagccagtcgaggaagagacacattcgaaattattcgcccggacgcaccgtggaatgacaaatatgaacattgaccgcctcatggatgagtttatcgagctgcccgaggaaagcgagcccgagctacctgatgcgaagccaacttccactgatatcagctccaccactgaggtgtctatggatgatgtaatgctggtgccgacggatggctgttcctcctctccgcagtagagggatacaaccacgagatatggaacaaacaaggattcaaagatatgagaccatttcttcatctgaaccatcttacatggttcctttatgtaagattaataatgtatgattgtcttgaatgatgttgaagtgaaatccgtagttcctggacgtctaatctaaacctggtccgtgcgtcgaacgcgaaatgccgcgttgaggacgcgctttacttcgatttccgatatatcacaaactgccgtccaatcgtgcgcagttttcatccaatctacgagtatccatttgttggaaactcgtacatacaatatcccttggtatcacattcgtttatctctcccctcccagcgcaacttgacgttgcgaaaacttctgcacccctgcgaatgacgtaccatctccatccatctagtactcgctttagatcactcacgctctttatattgtgactcaattctatcagacagaatgtctgttgaagacacagctactcccacggattcccgtgcggggactacggcgcccgaatcggtcattccttcgtcgccgctcacagacccaactgaggctgactcgaagtcttctcatgataaagacgacaaatctaaagcagatttgaccgattcagaagatgttgaggggatggatagcaaggccaaggccttgatgcacttgttgaaaaccagctccgtatgtccaatccatcctcgtcgtatctcatcaaatagtctcatatcttctcgtacctgcaggtctttgtcgctatcatgtcagataaaatgaagcagcaacaagaggacgcacgcttggcagcgatcaagcacaacgaacaagctgccgcgagtcagaaaaaagccaagtctcatgctgaatctgctcgccgaaccactcgaactcggccaactcaagatgcgatggaggagaagacatcctctagtggcaagggcgccaaggaaaagaccacaggatcgactagaggtcggcctaggcgggcagccgccgccaatggcaggcccctttttaaattttttcannnnnnnnnnnnnnnnnnnnnnnnnnnnnnnnnnnnnnnnnnnnnnnnnnnnnnnnnnnnnnnnnnnnnnnnnnnnnnnnnnnnnnnnnnnnnnnnnnnnnnnnnnnnnnnnnnnnnnnnnnnnnnnnnnnnnnnnnnnnnnnnnnnnnnnnnnnnnnnnnnnnnnnnnnnnnnnnnnnnnnnnnnnnnnnnnnnnnnnnnnnnnnnnnnnnnnnnnnnnnnnnnnnnnnnnnnnnnnnnnnnnnnnnnnnnnnnnnnnnnnnnnnnnnnnnnnnnnnnnccgggggggcgacccgccgccaatggcagctctatttctaattatttcaagaaggccgacgtggaagtgactgaagacaatccctcggtgcagcaagcccttgagaaggctgcagacgactacgaagcaaaccccacggctcttggtgagcagcacttagtcgcgacacagcagccagcacttgtgagcggtggcaaaatgagaacatatcagttggagggcctcgaatggctcaagacgctatggatgaatgggctttgtggcattcttgccgatgagatgggccttggaaagactgttcaagcaatctccatgattgctttcttgaaagagaagaatgtttcgggtccgttcttgattgcagcaccgctgagtacggtgagcaattgggtagatgagttcgcccgatggaccccgggaattaaaacgatcttgtatcacggctccaaagatgagcgagctgtcatgcgcaacaagcacatgaaaatgaaaaatcagggagatatggacttcccagtggtgtgcacatcctacgaaatctgcatgaacgaccggaagttcctggctcaatatcaatggcgttatattgttgttgtacgtttgtttcaatccctttcctttacaacatttacacgacactaatcgatttataggatgagggtcatcgcttgaagaacatgaattgtaagctcatcaaagagcttttgacctataactcggccaatcgtctattgatcactggaacacctcttcagaacaacatctcagagttgtggtcacttttacatttcctgcttccggaagttttcaatgacctcaactcatttgaggggtggtttgatttctcctcagtcctggacaacaagggccaggcaaatcttgttgaaaaacgcaagcgtaacttggttactagtatgcatgccatcctcaagcccttccttctgcgacgtctcaaaacagatgtggaaactaccctccccaagaagcgggagtacattttgtatgcccctctgactcccgaacaaaaagatctatatcgggagataatcaacggtacagggcgtcaataccttgagggaaaagctttggagcgactggagaataagagcggcagctctacgcgctcgcaaagtatgaagcgcaaacggagtagcgatgatacaacgccggtcaagagcgccagacccagcgggacatccacgccagctagcaatagaaataattctagccgccgttcccgacgcaatacgcgtcagagttacaatgatctaagcgaaggagagtttgatgagcacctccgcaaactcgagctgggaattgaagtagatgaagagcaggtcgatcccagcgatactgagcttgaagagatgcagcaggctgagaatctgaagcttgctagtacgtcattttcagatcattttttggtttttgctaatattatcttgcagagaaagagattgggcaaaagaagatgcaaaacccggttctgcaggctcgtcttgcctgcaattctccgcacaatttctactggccttggatggacgagtcctcttctgtagacgaaacactcgtctccgcctctgggaagatgcttttgttggaccgtttggtttcgtgtttgctgcagaagggccataagatcttaattttctctcagttcaaaactcaactcgatatcattcaagagtgggcaacaacccttcggtcttgggagtgttgccggatcgacggcgctattgcacagtcagagcgtcaggctcagatcaaaaacttcaattccaaaaagaatcacaagctcttcctcctgagcacccgagctggtggccaaggaatcaatctcaccgctgccgacaccgtcattatctatgattctgactggaatccgcagcaggatcttcaggctcaggaccgagcccaccgcattggccagaccaagccagtgattatctacagattggcaacgaagggtacggttgagcagacactcctcgagaaagcggattccaagcgccgtctcgaacgtctggtaattcagaaaggcaagttccgctccctgctcgaccccagtgcgaattcccaggatatcgaagaactgcgcaaggttcttggcgagaatgaattcgagcggttcgacgttggcgccgaccctgcatcgatcttgtcgaatgaagatcttgacatcttaaccgatcgctctgaggaggcttatttgcgtgctgagaagggattggatacgaaaggggatgcgtttattgcggttgaaacgaagcgcgatcctggtgagagcatcctttcttgagatgtttaatggctgtctacattatttcttctcttccatccaagctacacgctggatgatatctagaggttactggatggtacccatatctattggtcggctagctggtttggttggcgtttacctacaaggtcggatgggtggcttattcgtgtatgttccctagtctagatacctagaccattgctattataccgtatgttcaattatttcaatgtttacactcggcaataaagattatgcagtgccatttatatagagtggcataaactcactgtagtgcgtaggatggaccataacttgagccttagcggcactatagttacatagcccccattccatagtcagagataaagatgcaaagactatccatttgacgcctgaagctccctaacaagaaaatggctgtacatgatagtcgcgagaatcaagaaggtaggacatatatgcagcgaaaggggcaatggaaagaaaacaagaaacaaaaagtattaggccaacaattccgctagtccacatccacagtagtcaatcaccgccgagctttctcgtcctcaatctggctgcggagatccgaaaggacatcatgccgttgggccatatgtttcttcagcccttccacctgttccccaacagccttgacatcctcccggagtcgctccaaatcctgaccatccttagcacggccagtgccctcacgcaactcgcgcaactcccgctccttatactccaaaagcgagagtgcctccttcttaatcaaaacccagttgggccggccatcgttgcgcggcccatcccgcctagattcggaggctttattggcggattctagcttcttctccaattccgcaagctcgcggcgcagccgcaccttctcccactcctcgtcctggatcgtgtcgctgaaatccgttcccttgggctgatacgagcccttgccaccaacgcctagacggccgaggtaggtatcgccgaacttggccttgcggcctgaccgtgtttcggtgtcaccgtctacgccgtaacgctgtgcgggtcgcgccttatcaacttggtagtcaatctggttgtgctcgaatgaggcacgcagcgaggcggggatggtgcgtgggatgcggaaaccctcgtggcggaagttcaatatgtgcaggaaggcgagcgtcgcatctttatttatcgcgggtgatgcggaggggttgaccaggttccaggcggagcggacgtccgtgtcggggacgtcgagcgattcgtagagcggttgtaattgttggactggggtctgtcagcggggtatttttctgggcgcgcacagcgcgctgtaagggctactcacattctatttggccgcgcgcgttccggttggcgtcgtagatctcggcatacttgttcttgtcgtcgggcttcatataccaatcaaagccgtcctttaggccgagcgagtcgtcctcgtcttctatccgctcgaactgctcctgtccgctgcttagtgcgcgggtcgcatggacgagatgtgctttggactctggaactagccaatctggcaggacatttgggacatcttgtagttcctgtttgcagataagacttgtgttagagcgatccgataattattcaggaggatggatcacttacaccattcactaagtcgaagactaagcgcattgcaacacagaactcctcgaaatctagctctccgtctccgtcgacatcggcaatgtcccagaccttctcgagttgatcatcgcgcagccggctgttcctcagcacggaggcggcctgggagctgttgaggtgtttttgaccatttgataatgaggcgaagatctcccaatatcgctcaatctcccattgctcaatctttttagtagccatgatgtatggagctccgataaacgtggtagaggatgaggtgggaacaatggggggagagactcggatttacctacttccgtcaggggctctgaggtcattgggctcacaatgtatttatccttctctgtagtatttatattgaaatgtttatcatagttttcacatggatatctattagaatctatctgttccttgcattatggtacatgatttcctgtgttgagtaggagaactcgttatcctgtcctcacgtagcgattaaatcttcggcgtcatgaatccttcttctcgtctttgttctcttgtttagtcttctctgcagcctcgagtcgctcaccgacttgaataatcgctcgttcagcttccaaaacaagctccggcgcttccaggatcgtagccaacttcttggcatcagacatcttcaacaggacccgatcctcgctctgctctatgtcgtcggcaacctcggaatatgatggctcggtcgcggaaccttccagtactccagatacgcgtttggcatatagctgttctagccccggtaatgagatagggttgaggatattctgtccgacgagtaattccaggtgttttgaaccattcaatgctgtattctcgtcagttttatgagccatcgcaatgtggacgatcaaaactaaccgcgccagtgggaccagccccgatatgccaagtagaaaaagggaatattcggaaccctgctctttattagtataccatatcaccggagaaggctcatgtctttcacatacactggtatcaatccaagtggggcggtaatcggcgcagctattaagcaccacatcatcttcttccgatgaagctcctgtctctccgtggcgaccgtgcgcagtacatcttgaactcgctccaatcgcaccgcgttaccagggaacagcacatccaccttagtcttcccatgatccccattcactcgctgttgggtcttgaatgaaggaatgcttttgagggcccattcttcgtatggtatccgttgctggactcgattgccccagcgaacaaggtgcatcttccatcctttgtcggcttcctcccacttggcccatatttcagccgccttggttgtgatcctatcaaggaccgacagctccttcgctaagtccttgctaaggggccgagcatatacgagaactcgctttgtggagatcggaattaggaacaggcgcatggtggtggatgcctaggaaaattggcaattggcactcaacaatcgagaatcgcttgatcgcgggcaagataattgataggtatccaatagttattaagagatactgtggacgacttcgaaattaaacgttcattgaaacttgatcctgtttttcgtgtgggtgaaaaagggatgcgggagtaagcaggcctggaggtccacgcgcataaatccagacgtcatccgaggtccgcgtacactttggtttcggtccctgaacactttaacttcatacttgaacaagaaacaattggggattcgcgggcaaactattgattgaagtttcccgcgactcccgggtttcagctttcaatttctgtcctgtattatgcacagctccaaagacagccctccagggcggatcattggtgacaagctgacagagaagtgttcgcccattccagaggcgcccctgacatcccagcttagcattgagactgagcccactgttcacaataaagcttccgatctatcacttgcgcatacagatggccagggccagacagcggaagagatcgcatactcccaacgcttcgccttgcgatctttacctggtatggttccatttaaagctcaattcgacgatcactcactaatagcgagtctttatagcctggattcgctcggtcgacgaacccgaggaggacggagataaagctacggcaaacgatagcttactcccttcccaaccaaatgacgcgtgtgtcgctcagcacaaccattcgccctactcgtcctcgaagccgaaacctaaccacacgaccaacaatggcctcttcgtggaggactctccaatggtcaaccgtgaatcacgctgggtgacattctcacgagcgatccaatacccccgaccgcccggtagagaggaacagcatgtcacgtcagaatggctgaatgagaatcatggtgattactcgcaaccatggcgaggaaagcatttggagggcgatagtccggagtacccgctgcacagcggagggcgaagggagatttggatcacgcgtttcagaaacacgcttctgcgaagtccgatcgtaccgttgattcttcgaatgactgtctggtgcttctcactctctgcactggccctgggtggatcaattcagcaaatggctaatcaagggacacaccctcaaggcccatctgcattgatggcaattatcgtcgatgcagtcgccatggtttacctcctatacatcaccttcgatgaatacacgtcaaagcccttgggtttgcgttctccttctgctaaagcccgtctcctccttctggatatcttctttatcgtcttcgattccgccaatcttagtttggcatttgcttcactttctgaggtgacaggatcctgcaccgaagcggaggtcaaccaaacaatcgatcctcgaaatgatgggatatgtacgcgacaaaaggcacttgcttccgtattgctggtcgcgctcttggcttggcttatgacgttctccattagtgttctcaggtaagcccccctgtctataattggcatactcagtccattttctaacgctctgataggcttgtcgagagagtaacacagtgatttttgagccttgttgtgtttcatgaatcttttagctgttgattacatataccatttaagcgatacttgatattgcgcaggcgcaattttagacgtgcatggcagggccgtcaccaccatacaatggatcttgacggaaccacgccacatccttgattctccgcaactttgcttcctcttctggcctcccataacacatatcccactgttttccgagtggatatgcgcccaccatttggaactcttcctgattccagtgcaggtcctctaaaagtcgatgacccacgcccgcaggcacaatgataaaatcaccgcgctgtaccgttggctcaaatcgtccggggttctttccgcctccaaaacacagacgtgctctccctgaaacgaccccgagcacctctggcgttgtggagtgaaagtgggtttgggtgtacatgctaaacacccactgaggaacaacctcgcctactgcctccaggtgatcttcgagctctgtagctgtggcattgaaggccccatggtatatcatgagcggcttggattggatcgaagtgttcggtatacgttgccactcggggatttggcgagtggtcacttgaatgtctgactgtggagttatggccattgcgagtgattgtttttgctttgctcattctgcattggagaaatgtttggaggagttatgttgtaggttgggcggtaatacctcggcgcgcaggtatgacgtcatccttggtgggctgtcaataaagtacatagaacctcaggtatgtaggttaatgaccatacattctcctggctatatatgattggcactttttactactttcgtatttcgtacatactaatcatggcaatccggtgtggtgggctggctgcaccgatagcaaaattccatttgcaatcatactgattggtatcttatactctctataaagtaacttcatacaaaaggttagcgcagtatcgacttttcttccagaaatagttattcggggccgtgtttgtcaggttctgttgtatataattaaggcctgaaatcagtttcaccaatttatatgacgctattgtaaatgattttcattctaaacaagaatttcgctctcttttgcttagccgggcccttctgtgtccgagatgacttttcatccagtcgaatcctgcagcatgcttgacgaaaagaagatcttgagttggatatttctactccgtagatgttcaagtcactctaaaatacatatctttcttcaagcatgataattcttactagggttgatactagttgaatatatcttcatatttttctcctaactagtttgggagttaagatcgatgttatgattatgtaccttttgtatgaagttactatataaaagatacctaatttgcagccgtaggtgttagcttggcacgattgtctcaagatatgcgaatgtcgtcatttatttgtacactacaaagtacacacgtagactagacctgatcagggaacttgaaggttatagtcatgtattcccatctgtttctaagattctaagacagcagggtgcttcttttacagcctagctttgctatatgtctagaagagtttgaagtccgtactagtactgggtataaatatagatctatggatcaagtctcactagagatatgtgtcgtgatacagatatagagacaggtttattatagagaaaccaaagccccaatacatgtatatcaccacatgctaaagtatcgtctgataaagaaataataatctatatacttagagcatctagattcgctttgatcaaaagcatcaaagccgatgatgtagatttagcgggaaagctccgccacctcaccgcctgcggcaacaaggccatcatccccacgctggtcctactcagcctcatcatttctctgctcctgttctgccttatctcttttccaatctttgctctagacgttcccgaggatatcgtcttactcttttccctcgactgtctggaccccactcttgcaacaacccctcctcccaagcgtctaccctcattcgatcactcgaagatcctttgaggcgtgacttgtggcgctacaaccgtcttgaggtaatattcatgacgtgtaacctactggttactatcgagagttaagagcgcgttgctgacttagcggagtaggactctcggcctggaccactcaccttcttccgcatcccacctcccctgcaaccgcgatgtctcccgcgatgccgccggtacctcacaaggatgaccttgattcaacgtgagcagacaatgaattgggattttgcttcaatgcgatggtatggcatgagctaactgggttagttggacattcctagaagcaggaatcgagagcgtcatgctcaaccttgacgccggaatcgatatgaagaccgtaagtgaaatgccgaacgatccctgtcgatgagggtgtttaaaaaatagaagcttactggctgtttttgtctagtacatggctctgtacacgtgtgttcaagattcaacaccacttctctgacgagaaccacactcacacattgatattagggctgtccataacttctgcacatcccaaaaagcagtcgctagtggccaaggcctacaaggatcacgtgggggttcgtttttccccctgtatgccagttctcgatatgagctgacctggacccaagcccatctgctcggcgaggaactttacaaattactcggcgaatacctctcgtcccatctgaataaggtctacaaacaatcacagagccacaccgaggaaggccttcttggcttctacattcgcgaatggtaccgctatacgaccgccgccaagtacgtgaaccacattttccgctacctcaatcggcactgggtcaagcgtgagatcgacgagggcaagaaaaatgtctatgatgtttacactctgcatttggttaaatggaaaacggaatttttcgaaaaagtccatgagaaggtcatggacgctgttctgaatttgatcgagaagcaacggaatggcgaaaccatcgaacagtcccagatcaaagctattgtggactccttcgtgtcactgggtctggatgagaacgatagctctaagtcaacactagatgtctatcggcagtacttccagcagccgttcatccgtgccaccagaagctattatgaaaatgagtcacggcagttcgtggccgaaaatagtgtggtggaatacatgaagaaggcagaagctcgtctggaagaggagaagctccgggtcggtctgtatttgcatccagatgtcaccaagagcttgaccgatacctgcctgtctgttctcgtcactgcccactcaactttgcttcgcgacgagttccaagtcttgctggataacgaacgtcaggacgatcttgctcgtatgtatcgactcttatcaaggatcaaggaaggcttggatcctctgcgcgcgacctttgagaaccacgtgagacgggctggtttggctgctgtcgagaaggttgcttcggagggcgaaacactcgagcccaagttgtatgtcgatgccctactgcaagttcacacaaggtaccagaacttggtcgacgaggcctttaatggcgaggccgagttcgtgcgttcccttgataacgcctgccgagagttcgtcaaccgaaaccgcgtctgcaagacgagctcttctaagtctcccgaactgctggcaaaatatacggactcactgctcaagaaaggatccaagtcggctgaagagtcggagcttgaggagatgctggtgcaaatcatgacagtcttcaagtacatcgaagacaaagacgttttccagaagttctattccaagaacctcgccaaacgtctagtccatgtgagctctgtttctgacgatgctgaaacaagcatgatcagcaaactgaaggaggcgtgtggtttcgaatataccaacaagctgcaacgcatgttccaggacatgcagatttccaaggatcttaataacaactacaaggtctggcaggacaaagtactagaggatgaagaccgaaagaaaatgtgcgatgcccacttccaaatcctgggaactggcttctggcccctcaatgccccgaccaccccattccttgcgccaccggagatagtcaagaccgccgaacggttccagacattttactttgacaagcacaacggccgcaagttgacatggctgtggcagctatgcaagggcgaaatcaaagctaactacatcaaaaacgccaaggtgccctacactttccaggtgtcgacctatcagatgggcattcttcttctcttcaatgaaaccgacactctgtcctacggtgagatcgaaaaggctactaccctagctaccgaaatcctcgatcccaaccttagcatcctgctcaaggccaaagtcctcatcgccagccccgagggcgctaagcccgagccctccacttcgtttacactgaactacaacttcaagagtaagaaggtcaaggtcaacctgaacattcagatcaagtctgaggcaaaggttgaggccgacgacacacacaaaacgatagaagaggacaggaagcttctgcttcaagtatgtctcctacctaatcatcactccccacacagtctatttgtcctaaccttgctatagtctgccattgttcgaatcatgaagtcacgcaagaagatgaagcatgtacagcttgttcaggaggttatccagcaggtcaaatcccgcttcccgcctaaaattcccgacatcaagaagaacattgaagcccttatggagaaggattacattgagcgcatggacggcgatgaaatctcgtacattgcttaaatcgaattaaattccccttcccccttccccttcccgcccacttcctccaatattgcacaattaactcgtttctatttcctttttctgttgctctctgcttttgctactgtctctttccgacaccagtggcttcctgtgtccctttacccttctataccatcgatgatgaaatagcaccgcaaagggtatgggacctctgctggtccaggatagaactcctacaatggatagctagcggatagaatcaggctgataggagcatgaattcttctcattgtatcggcgacttatcttatgtttcttcatagcgctgagacgacaaacaaatgatgacctgattattttccttgcttttttgctcttcgctcttcgctcttcactctctgtttcttctcttttctgaaaataaaaaaataacaaaatacaataaattcatgattatgttctgcatagccggctattaggtattcgaagattaaaacaacgctgatcaatattgaacatcgtagaaacgttcacttcaatatttcattcagcggatcaatatgcgtagtattggctagacccagtgcgtccttatgtatagtcaagacaagaactgtgctagaatggatatgctatgcaaagtagagacgacaagagagacagagaacagaagaccgaaagtccatgaagtgctgaatcaccctagatgcgaaaaacgcaaatcaattccaggtcccaagtccagcgcactagttcgtaccagacgagtctttgctctggaccggatgcgcctcctctttgacagggagccctgtcgccaagtcctcaagcggtgtatctacctcctcgccgctcgggggggtgggctccttctggatctggggaacagtctcctcggtcttgagactcaaccctaggccttcattcgacgtgagagccacaggggcgaacccgtctgcatcaacggtatcctttccatcttgcttaaggttctcggtctgcttgtgcggatcataagccgggaacccctgtgacaggggagacttggggaagggagtttcgatagaatcggacgtggggacgtcttcgtagcgctggaactcgccgctatcgcgtctgagtatgatattactccacctctttctccgactggtgctgcggctcagaccctccttggggctctcgttgccttcgctattacgcaggatggagcggcggcggccgcggtccatctcggctgtttgggtaacgatggacaagatcggggtggatgccgaggtcaattcggcattgggagaggtacttgggctcggggatgtcacgcgcttttcttgccattcgcgccgcttttcgctcgcccaggtgccccacgagctaagatacgagccggctttttggctagctacgctcacggaggcctgagcctgtgtcaggtcgacggatgcccttgggcggtttgcgaaccaggaggcatcggagggattcggtgaagtgggtattagtgatattggggtttctttgtcgatggaggtgcgctgcgattgggaggcggctctctcttcggtgcgtttgcgttgcgcttcgcgcatagtctcgagatcggaccagaagctggtaaatgccgcgctcacttttttttgtccggttgagaagtggcggttcagagcctcgcgaccttcccggacacgctcatcaaggtggaggtctgctacctgttgtgcgagtcgtctttggacatcttccattgtcagaccgccggcgcttgggtgtcgtggctcagtgatggaaaataggagcgcatccgaagtgagacgtgagaacagggcgtaattatatgtggtcttccactgggtaaggaactctgtattgaagtcggtggcagggtctccttcaatgttgaggttttgcagctgggttctgctgcgagccgccgattctccaacgtcggatgggtagagctcctcgtggtacttcatggacgataataatgctaacaagtattcttcgaactgtagtcgaatgaattcttctgagcccataaagccaagggtattgggttgtgaaggatgttcctcgtcccaagtgtcattgacaatttgtgtgagcaggtcaatccagcgcctatcggccgctgagagaactagggcattgcggagggaaggagaatttatgacgatactgtcttcgtcaaggttaattagaatatcactgtaccggtccttttgctggagaagtagcgagtttgttgagccaaccacataagattttgtgccatcatctgccagcagatccagcagctggaggggtgtataggggccaaacatgcttccctttccgaaaatctgcaatgggagccccatgtatgccaacaaagaacttctgtcactcgtcttgagagatgttggtttctcaacagtctgagagtaggtgtcaaaagcaggatctgcgcagtcctgcaagctgttgatgaggccgggtattaaagaaataagcgaaaactgaatcatgcataggcgttcacagcgcgtcccgaagaaaagcatcttgggctgcaacagtagtgctttaaaaagaaccaaagtctgaaatttgaattcgtgaatcatctcccgtagcgagaggccttcataaattagcgaagcttcacacatatcggagaggatgatatccttacccaagttctgatctttggggccatcattcaacagagaaatcaccaagccctcgcggaatttctgtatccatgtcagcatttcattctatacattgccgcaactagtacataccttcaagatatcaatatccgagaagtcactgtttataacagtgccgaattagccagattccccattcaagccaggttctattccacttccatgccagcgcatcagggaagcaaatagcccaccgggacaagtatattccacataccgttgcgcgaaccaagccgaagtcaccacggagagcttctcgcgcaaatgacctactcgctgcggagtatctgtcacgaccacgacggccttttgtaccgttgaccgagtcacatcgggcgacgggttgataagcagactcgaatcaatctggcgggagcaggcgatgccgaacagggaggtttcaggcgcagtggatgtggcctttcggcagagtgtgaaatatgagaattcctcggtcgatctgcgatccgacgagttagtgggtttggcgcaaatcggcgctccttgtcgcgggattgcgccagaggagacaaagaagggaggaaacgagatgcgtgtcggggacaggggtatcgtacagatgtgctccgtcggatagggccatgaatgggagcagagaccagtcattctcggttgctgggtcggttccttcttcggcaatgcaatgctcaatttcagggccgctgtaggtgtttgtctcagtcagccaggttccattatgtccgtcttcgtattcttttcaacgatacgagttcggctctcgagtgtctcgtggctcaccgtgcatggtggaaatctatgactaagacaattgtgtcttgtttatgatggacagccatcgcgccgaacctcgaacggattcggtgcggctttgagaaatgcaattagaatgccgagaatacgcagttcaaatgaatggtttgcaacatgtagaaagtagctgcttctcctccaaaacctcgacgtaggtttcgtttcgcatgagactgagatcgtcgcaaacaggggaacatcgctgatacggttatcgcacggggagcgggcggtgagggtagccccgccaatatgcaacacaggtaggctaattggggaaaagtgatatactactagtagtaggtaactactccgtggtgttgaggaaataacttagattgcgtagatatttcaaaggattataggttatgaggtgctccatcgctgaactgaatcagattccccgtatgatttctcttaatcaccaaccaattcttgacgacgccggaagagttatggacaaggatttccagaaataaaaaaagaacaaaatagaaaatgaaaaataaaataaaaaacacagtgaatacgccagcttcgtagcacccttgaacagaaatagagccagacttcaacttttgaaactggaattcaatggcagaagagcgtttcttgggggagggggggggaaggtctcacgtcaaaaacattatgcgaatgcctgtccagtagcgttgccctgtactgcgccctgtaccaaggcttggccagcctcgttgccttgttcaatgttgtggaagtcgaggatttccgagtacctagggtggaaaattagtaaaaaaatcgtggccggtaacatattcggaacgtacatcatgatcttccaagtatctaccggcaaatcggcatcattgaacgaccaatcgaacttctcttgtgcgacaggttcgtcggtggggtcatggtagggcgccaggtactcatgcgctaatgcttctgtggcttgaatgcgctgcttcgggttgaaaaccagcatccgctcgagcaggtcaaccgctaaaaaaacaagttagcgcattgttcacaactctatggtgcaaactatgacgtaccatcggcatcggcgttcttgaatttatttgcgagtggttggcgctcgcgctttggtagtgacttgacaaatcggagggtctagaccatatattagcatgttctcgtctttctaaacaaagcataactcacattctcgctgcagatagtctggatcacgtcctcgggaggagtaccgagcagctccgtaatgatcgagaactggttgacatggtcctttccggggaacagcggctttccttccaacatctcggcgaagatgcagcccgcgctccagatgtctacctcgacgtcgtacttttgccaggtgagcatgatctcgggcgcgcggtagtatcgtgttgagacatagccggtcatttgcgggtcctgaatgcgagcaagaccaaagtcgcagattttcagatcacagttctcgttaatcaggatgttgctgggtttgagatcccggtggaccacaccggcggagtgaacatatttcaagccacgctataagaacgttagattccggtgccccgggtattattcccgtggaagtcttaccagaatttggtataagaagtactgaatgaattgcttttcaagagggcgcgaagtgagaagtcggtggaggtcagttcccagaagttcggtgacgaagtagctgtagtcgttagtttatactgttcaccccgctttgtaggtaagggggacatacatgtcttccaaaggcgaaatgaaaatgtcactcaagctgataatctgtgggatgtcagcaagtaagactagtccatttatttgacggagtacggacgttctcgtggcgaagatgtttgagcagcttcagctcgcggtaggttcgcttggacagaacgggggtactgaacggcttcatgattttcttgactgcgactggctgtgcggtcaattggtctttggccgaactgtggtattagtggccttgttagtatatacttggtcttggaaatatcttgtgcgacatataatgcaacataccagaccagtccgaaggcacccattcccaccggctgtagttccgtatacctagaatcagttagcaccaacatcctctcaaggcgcttatgaagcaccccaagtagataccaaggaacagggcattgcgaaccggctggtgatctcaaaggtggtgccaaaaatctgggcacgcacgaattccgccatgatggaaggtgggggtatgcaagcggtaaacgagaaagagagatattcctatcagaattccacgtcaaacaagacgaaggagagtgaagatggtagctttccagagaaaattgccagaagaaaggggtcgcgaagaaagcaagtgtgttggcaacaggtgtggggaagggactgggtgaaaagcgcagaaaacaaggccgatgacgttggcgaagtccggttatgtggatgactcagcagcttctagcccgtgtattaaagtgggttctctgaatattatatgcaggttggcacggtggttgtatttctatgttaaaatctctgtggaggtgttgttccttgcaactatacaattctcatcctatctcatgtccaggtgttggttatgcgaacttccaaagttggcaggtaaccctcgctccaccacgcggcccagaccctggtcttatcccggaagatgtttcccttgaacaggattgctcgttgatatcgttgatatagactgtagaacttgtatagacagatcaatgcggtaaattttatctatgtatatctatatatttttttaattctgcgcttaactcgctcgagaaccatatacggagagctcttgggcctctattgagaaccttggcaggtcagagtacaacccctcaccttcaacccccttaagcagacatggtagatatcggaatttaccaaatctacatgtatataagctctaccatagcttcctctctggtgcttctataggtctggtagactgtcccggaagacattgctgtaaaagaggtccgttccccaagcctagagcacatccctccggctatcaaagcacaattgactgtcccaataggccagctccaatattctctgacgtgtcttcttagcttacaacaatgcaactcctggatgcaatttggcggctgggacatgtgaaacaatgtctgccacgctactgcggacaactagtacatgcaacaaaggcctttgaatgaggtgcttgactggacaggaatgcagcttattttaaactctggagatatatctccggggatgtattccctaagtgtacctgatagacatgtgcacattcgcatacaaacatatattcatgggagatatatatatagtgactctccgtggagcctgacgattacctctctacctcacactgcctaggtattaataataccaatgtcaatgtgctcttcctagccttgatcttgccagtgcgccctgtacatccgtctacaagcctgaatctacttccttgtcgtgaggggagagggtcagtgcccggcttcaccgcatatccaagagaagtcagtggtcccaggatgaaagcagcacgcaggtcatgcaaatcaacagaaccatagcatttataagtatacaattctacaatcctatataatggagactatccagctgtccggagtactccgcgtcccaacccaaccccgccttgcctgaggcagtgccccaattttgccggtactctccactttaaagctccagagtgggttaaaagagtatggaacggaatacttggtacggtacggagtacagaactcctaatcagagatttggattggagattcgaggtaaatagaatctatataagatgatcgaacttccgatcgaagatacatgataagaacatatgatcgcacagcctgggtcatctggtggcgccccgttcaattagagcccccggggctgttttctgtcgcttaaacagtcttgttgataggagttctagtattacgatctgtgattgggatggttattgcccggcctaaaatgaatgagatctgacagcagaacgtgcccgtttcccccgggtttttccttacaccgacctgggacatagctatatatggaccagacaaaagaagaaaatgaacagatctaacaagaagcccaaagatgcagttggatataggtaattgcatatcagatacaagatacaagacctataaccacaaagaaaaagaaattaaaaacaggattaattacattaattaccaaatgtaagctgagccgtacctgtttcttacatatcttacactccctctccactcccccagcatgacgatggtcgcactgactctacctctgattcttttaggactcaggacacttttctaccctgactctactctcacatttatcactctctaagctcagtctctaatttgaggtcatccctgcctctccgcgtttacacatattccgcctcccccgtcctaaccgctagacccgaactcaacaactctccttctaaacccgcttgtcgcaactccttcgacctcagcctttccccttgacaccttctcaacctaggtcctcttgaaattggctctgatctcacgtatccctatttccacacctggtcgcgctgatcctttcccgtgcgtggcgcttggcagtcttacaagcgaaggctccggccgtcttgaccggcacattttgttcctgcgcgtggtggatgagtcttctccctgctggtctgggttactgacgatttcgcaatggggtcgtgtttcagctcggagtccgcgggggacgcggaacagaagaagcgaagtcaacagatcgaccgcaagctagaagaagattctaggcggctacgaagagaatgcaagattcttcttctgggtaggcattcgggtgttcgcttggaggagagctgatggttgactttaaactcgcgcaggatctggagaaagcggcaaatcaacgatcgtaaaacagatgaagatcatccaccaaaatggttacaccgtcgaagaacttgcgctgtaccgattgaccgtgtacaaaaatctgctggattgcgcaaaagcccttatcggagcataccactatctcaaactcgaaccgtccagccagaaggtgcaggattacattacatttctggaagagtacaacgtggacccggatcccaacactccgctcgattcgaaaatcggcgacgcgattacatatctctggaatgacccgtgtacatccacggttttggaacatcagaatgagttttatctgatggactcggcaccatagtaagtccacctatcgttatttccgatcgcaaggccgagttctaacctgtggtcagtttcttcgacgaagcgaaacgaataacggcccccgattacgtcccggatgtttcagatgtgctccgggctcggacgaagaccaccggtatatatgagacacgcttcacaatgggccaattgagcatacagtacgtgggaacagtcttgaacacgatttggaatagctctaaccagccacagcatgtttgatgtgggcggccagcgcagtgagcgaaagaagtggatccattgcttcgaaaacgtgacgtcgattatcttttgcgttgcgcttagtgaatatgatcaagtactactggaagaaagcaatcaggtatgaggctccacaccgaacgtactataccggagctgacagacttgcagaaccgtatgatggaaagtttggttctcttcgactccgtggtcaactctcgatggttcatgcggacaagtatcatccttttcctgaacaaagttgatttgttccgcttgaagctgccgcgatcaccgttgagcaattacttccccgattactcgggcggcaacgacgtgcaccgtgccgccaagtatttgctctggcgattcaaccaggtgaaccgagcgcacttgaacctatacccacagtgagttcacttgatcctacattgccagtttccacgcaccgtgatttttgacagctttctcttctcttagcctcacccaagcgactgatacctcgaatattcgtttggtcttcgcggcagtcaaagagactatcctacagaatgccttgaaagactcgggcattctatagccgttgaatatacaccgaaaacccagtcacacaagtgccctcataccgagtcatacgtatgcgcactttccctctcaactaaacttacgaccaatcaccgtcccttttctcaacgtcgctctcggtgtccctactaccctcttcaggagactgcctgaacagtttttaccatacccctttcgtcttcttttgcttcttttgctttttttctttttttcttttgaccagctgcaggtgttgatggcgcctttatggctttctcagctgacttcccaggcgctagttctggcctggggatatcccattttggtacttaatctggtttcctctatcaaatatgggtttatgttccataaaggtctcagtagcatgtttggaccgtcaaccaagctactgtttctgttccatgtgccctttccttcttgataagtcccggactgagcgtatgacaaccaacccagaaatgccaccgggcaagaacccggtagcgggactgaatactttccggactttcttcgtgtgctcgatattcctcacgaacccatcaccaatgggatttttttttccttgtctcccttgtcttcactgttgtatcttttctttgccttgtctcgaggcctgtttccagcccctcatgcataccagggctgttttcctattttcgacattgccatgtcctgctgatattactctattcctctaattcctcttctccgttttcctttatctgcgatctcttactcttctcctattacagctccctattgacctgggattcgattccaagcgcttccacgtctgatgctttttgttcgcttttgcttttgttctttattgctagcttgttcagcgttcttgtttcaacctcccgagaactcttacctatcttgcatggaccgatatcgggattgctgagcatttgccctatgccagatcgcggtcccccccggagccctggtcaggtggaacggagctgggattgggacgtgacacgggcttattatgtatagtgagcttcgagaatcaattctcctattcgagtgtgttgtccatactgtccctagatgtgcttagcatagatatcttttgggagtgaggacaggagtgatataaaaagtagaggaaccctctttataaagaactaagctatggaggaaatatattcttggcaaacctacaacgtccaaaccccgccccgacccatctcaccgccccaccactagagatttccccgatagatatcacaaggccccgcggactagaaccctcggaagcatacggccctatcgccgtgtaatgaatccaatgaatctaatgcatctggctaccccaggttcacgatcgagtcctggtactccagtagggctacaagcacggtacatacccgcttcatgcaatgcgtctgtgcgctggcatttgcggggtaggtttgcagtctaatgcgcccaagctggcatctaatcaccaaatcgtggcaaaacggagaagtcggcatgggctggatggttggtacggaagagctcgatagtttcgggcgatagatagctgatgtggagccgatgaagcccggaggagctgggcttctaggccctccaggccctgcggatttatattggccgttggagcatttccgggtcttttatgcgagcgccgatggacgtggcctgatgttgtctcgggcataaaaagtcacatgtacataactgcgacttggataatccgtcatgacgtacttctctctgcggtagcacgccagaaacaggcttcacgggacactactggccaaaaataactatggcgaggactggaatcagttagaggagtatccgaatattatttgaatattaatttgcatattaattcagaggcaacacccgaaaaaaaaagaaaatgtcggccggtgtcactccaaaagtcatgactacatcccctccccctcttttctttttaaagtagcttcctcttcaatcctcttttctttttcctgtactggactttctccagcttacagctctcccaccttcacctctttctctttccatcatgtcgacgaccaccccagatgcagctgcagctgcaccggcccaagcccaatcgaccctacctcgtcgggagcggagatcttcttccgtaggagctcccattgccgacctccagggtcctgtcggtccgggattcagtcgtcccaagcacaagcgcacattcactggccttgggcctgccgagattaagcatgtggaagctagcattcctgagccattaagagaggcgtgagtaccttccgcgagcacttgcttatagttgaactaaccaattctcgcagatggaggaaattcgtatgtggagaaaatcagggtatcgggatgcggggttccaagctaatacttggagtcaatttagtcgcctgctgaattcaccactaaagaagagttcgaggtaagtcccactggctttcgtacttgataccccagatctaacgcctcgcagacagatctcgtgcgccatatcgaaaccaccctcgctcgctcgctgtataattgcgatgagttgtatgtgttctgtgcacctcattcaagccgttcttgctgactggctttccatagggctgcgtactccggaaccgcgcttgcgtttagagaccggttgatcatcgagtggaacaagactcagcagcgtcagactttcaccgatcagaagcgaatctattgtatgtctccagcccggtgacagaagacaatggctaatccctgtagatttgtcgcttgagttcctcatgggacgtacattggacaatgccatgctgaatgttggcttgaaggatgtggctcgaggtaagcgctcagacaattgtgacctggaacgtcgctgatggtagcagagggattgagcgatctcggattccgcgtcgaggacgtcatcgaccaggagcacgatgcggcattgggcaacggtggtctaggacgcctggccgcgtgctttatggacagtatggcgaccctgaactaccccgcctggggatacggcttgcgttaccgctatggtatcttcaagcaggagattgtcgatggctaccaggttgaggttccagactactggctggatcacaatccttgggagttcccccgacacgaaatcacagtcgacatccagttctatggtaacgttaaaaagtaccaggatgaaaacggcaaaatcgtccactcgtgggaggatggtgaggttgttgaagccgtcgcatatgatgtccccattcccgggtatggcacgaagaccaccaacaaccttcgtctctggtctagcaaagccagtagcggagagtttgacttccagaagttcaatgctggagagtatgaaagcgcagtggcggaccagcagagggcggaaacaatctcagcggttctctacccaaatgataacctcgagcaaggaaaggagctgcgtctgaagcagcagtacttctggtgtgctgcctcgctgtttgatatcattcggcggttcaagaagacaaaacgcgcgtggggcgaatttcctgatcaggtcgccattcagcttaacgacacccacccttctcttgcaattgttgagttgcagcgcatcttgattgacaaggagggcttggagtgggatgaggcgtggggtatcgtgaccaagaccttcgggtatactaatcacactgtccttcctgaagcgttggagaaatggtctgtcccgttgatgcagaacctgcttccgcgtcacttgcaaattatttacgacattaatatgttcttcttgcaatctgtcgagaagcgattccccaaggatcgagatctcctgtcgcgcgtgtcgatcattgaagaatcgcaccccaagatggtgcgcatggcctacctggctatcattggctctcacaaggtcaacggtgtggccgagctgcactcaaaactgctcaagagcactctcttcaaagactttgtgacggtctgtggaccagaccgcttcactaatgtcaccaatggtatcaccccgagacgttggcttcaccaggccaaccccaggttgtctgcgttgattgcagagaagcttggaagctatgacttcctcacggacctcacaaagctagacaagctcgaggcctttatcaaagacaagcccttccgcaacgagtgggcggtcatcaagcgtgagaataagctgcgcctagctaaacatatcaaggccactacgggcttcgatgtcaaccccgatgccctctttgacgtgcaggtgaagcgtatccatgagtacaagcgccagcagctcaacatcttcggagtcatccaccgctacttgactatcaaggccatgtcagccgaagagaagaagaaggtggtgcctcgggtttccgtcttcggaggcaaggcagcccccggttattggatggcgaagactattatccatctcatcaacaaggtggccgatgtagtgaacaacgacccggaggttggcgatcttttgaaggttgtcttcatcgcggattacaacgtcagcaaggcggagattatctgccctgcttcggatatcagcgagcacatctccactgccggtaccgaaggcagcggcacgagcaacatgaagttcgtcctgaacggcggtctgatcattggaacctgcgatggagctaacgtaagtcttcttcacatatccaccttccattctgtactaacccaactcacagatcgaaatcacccgtgaaatcggcgaggagaacatcttcctcttcggcaatctcgccgaagacgtcgaggatttgcgtcaccgccacttctacggcgacttcaagctggaccctaatctggagcgtgtcttcgagacaatcagagacgacgtgttcggcaacagctctgacttctctgcgctcattagctccatcgatgagcacggcgactactacctcgtctcggatgacttcaactcctacatcaccacgcacgcgatgatcgacaaggccttcttgaataaggatgagtggctgaccaagtccattctctctgtcgcgcgcatgggattcttctctatggatcgcgtcactaatgagtacgctgatggtatctggaatatcgagcctctggttgttaaggactaaacacactttttgacaaaggcagtgctaagtctttcttcttttggtttgtcgtctcattgattaatgaactctacggctttggttgttatccttagcattaatagtatatcaatcattcttataagttagttatagaagtcatctagacatggtattcaagccattgaatagaacactttatatgcaattgctaaagaactaggtatatatacatctctatctcgacatacagaatatattacctcgaggcagtaatgactgatatcgaaaacacccactccatgccaaaccaagaaatctaaacataacatgaaaccataaaatacgtcaaaacccccaaatcgacaccctcactcctgaatcgtcggctcagtctgcctaggctccgagaaataatccggccaaagcgccatcttctcgtcccgggaaggcgtagccgtagccataagcgtaggaacctaaatcaccaccattagcaaaaaactctttcaatctttcaatcttctcttcaagggaccaaaaaacatacagcctccttactagaaatccgcctccacatgttcgcacgcgggttataccgcaccggcttccccacaccacccgtcttcctctgatcctccaaactaatcgcctcaacctctttcttaacatccgcaaagctatcaaacggcgtataagtgatcccatgctcgagacagtactcctcgagtctgagcccgcggcgcgcgaatagcacatcagcttcgcgggccgcggcgagatccgacacgccgtcgccgatgaagacgatcagcgggatctcgtccggctcgcattcggcttgggctttggtgcgggcttggtttacgctctcggctttgtcgtggcctgaggctgtattgtcgcgccagacgggtttccaagggataccgcctggggcttggaggtcgtttgcgacgatttggattgaggaggcctttatgtgggaagatgtgttagtgggtttttgaatggacgatttattgattttttgattgatggcggggattggtttttgacattacctctttctcgccgaggaagatgtctagcgtgcgctgcagaacgggctttaggcctgcgctgatcacgttgaaggggaagccctcgcggacgcagtactggtggaattctcggaagccagagtcgagttcgaggttcttttccattatgtcgaagccgtcgccgaaggggatgctgagggatccccacatgtcgtctgagatgtcgcggaaggttcgctcgccggttttgaattgttcttcgagtttgttgcggtaggctgcgccgcagccgaggttgtctactaggacgtggccggtgtcttggaggaagattgtgccgtcgaagtctaggggtgttagttttggggtgttctgggacttagggcttgtggttgggattggagggtagggaagagtttggggtatatgaatgggctttgcataccggagaagatgatgatctttctcttttggttgtcattatttgcctgtgatatagccattttgatatagactttagaagggtttgttctatagatagatggggtatgtggagggagtggtttggaaagatacgaagtgcaaatttaaaagaaatgaaacagacctgccaaagtcacgatcctaagtacaattcctgtagaacctggcatttagccatagcaaacaaggtagacaagaagtatgacgtaaggagatctaacgacatcagtgtgggccgctgagggggctcatctgcacatcgtgagaagtcgaggtgttaatatggggtataacagccgctgattggctggtcgtcaagggtccgcataatatcagtggaagccgaccgagtctttgatcggattggtcaatgtcattgtggatgcatgatacatcatacatttgtcaagtaaaatggtgcaaattaaaaaaaaaaaaactaagccgttaactcggcaacccgacgttccagttccggtacagcccgtaactgcaagtccaactcttccttctcactgcgagattgttaataaccgctcggcggaaaggaagggcggaaacttactcttcgagtttcaaccgccgctcccagtcaagactggtgaagatgtagccgccctgtccatcgaactgcaggatcttctggtgatacttccagagactgcgtcggtgcgagacagtcatgagagtaatgccaagtttcttggccgtctcgtacataatcttctcaatctccagcgtcaccgaggatgtacactcgtccaaaatggcaaacttgggtcggtgatagaacaaccgagccatagcgatgcgctgctgcagaccaccggatagtacgtcgcgccattcttcctctgcatcccagcctcccggacggtctacgacggacgcgatatcaaccactgataggatctcgtagagatcggcgtcagtgacacccttagcgcgcatctcgcgcactccatctgggtagatcacttgctgtcgcagggtcccacgagacagatatggtcgctggggaatgtagaaaatatcatggaaagggggttttttcaccgtacctccgtatactggccagagcccgcccaggatccggaaaagagacgatttgccgcacccgttgggtccgacgatcaggaggtggtcgccggggttaacggtgaaggaaagcttacgcaccaatacgtcgccgttcggggatacgatcggtacatcgatgaactcaattgcgtcgctttctaaaactttaccccgaccagacagcacctccgcattctctgccgtcgaagcggaagataccaacttcttctcgaaccttccagcaaggaggtcgtccatcacttccaataatgaggagacacgcgaagtgtagccagccagctctgagatttctttgtaggagaacatcaatcggccaaaagcatctgaggaggaaagcaacattcggcgattggtgacgaagcctgggagtcatcagaatttaaaaatccaataccaaagggcaacaacttactttcagtgtgatctgccatgctgtgggtagtctgaccggggatcttgaagaagacaggcacactacatagcaccaagcccatagctccccagaaatacttgatcacaaagtcctccatgaatccgtggtaaagtcgccggcgcagaatgcggttcacatgtttgatcagcgtgaaataacccttgtccagggtatccttctcggcctcgtggccgtggtaaagcgccacttcttcattgtactcaataagccgtgaatggaggaaacggaactccccctccagccgagcctcatcggcaacatatttgccaaatggtggagtcagcatacgcatgacgttggcggacaactgcactagcagactcatgatgaacagcccttcacctcccacgttcttggagagcgagtagttgtaaatagccatatcgagaatgggcttagctaaattggaatacagttctgctagactgtctgagaagcgggacacatcgaccgtgacaagttggtcgggattcttgattcgatcgtccaaggcggagatggcatagaaagtcatattagacagatacttctcgtggatatagtccgtgagacgcttgcggtagctgagagcaagcttgcactgatggtaggcgagctaatacggcgaaacatcaagtcagcaaatgtactgaacggtcgcatctagcaccggaaaccggagacttaccatagaattcgtaaaagtagcagggatagccacaatcatccaccaaacaagaccgagcaagaaatccttccccttaccgcgcaccaagttgctcacaagtcttccgtccagctcggcgacgtacaaactaagtatcgtccgcagcaccaggaagacggtgtggcttaccagcagccgtagctccttgctccgccatccgggtataacgatcttcaataaacggagcaagttcttgaagaattcccggttgatccccacgcgcttcttgcggggttgttcctcatcacctagactactggtgccgggccgtcggagcagctctacctgctgtgacgcggctttctgctcggagatggcattgtggattcgtttggcgagcgcggcaaagagggcgaggtatacggcacgtgagatattggttcggtttcgcaggtagagggatgttaggctggagaggatctgtttgatggagcgttcgggcggtagtagtttggactgagcggccatggcggagctattggatgcttatcagccagattcgggcgcatacatgtccgctgttgagtgagttgagggggtcgaagggttaggagttgaggagaaagaggctattgccatgacggaggtgacatgtgataccccaggaaactgggggagattcagccgaggaatccactttcaggtaatctcactggtctaaggtagtcaacaccatcttacttgtaatatatactcgaacgcatttaatgagaaaaatatacatagagatggggaattcattaattagaaagagtgatacagccctgaaacaaccacatgtatatacatatatgtagtcatgcagaaacggtaatgacaatgacactgaagatgccaatgataacaagattccgcccttctctcgtgcccgaaacgtatatacaaaagaacggggtgagtagataatactcaaagacatgcgctagtatgtacaggtttgataaaacgcaagcttgcagaagaatacataagggcgaagatcataaatcgagatgatataaatcaaaataagaaaacctaagacgaggatttgctctctggttcattgcggcctgtcctgggttctacctgatccctcggacggataccgctgttgatttgggcggcgatctgggcctgcttgaagcgctcgaatgcttcggtgtcttgctgctgagcagcgtagagttcgtcgacggtggtcccaagatggttaaaggccacgtcggcatcaaagtcatcgaattcagagagagactgctcatcgtggagaatatcaagcttttgccggagagcggcaatatgcgaactatcgtcctcgtattcgaaaggctcgtcgtcctctccaggaacaagagacgggttgaggaagtcgcggcggaggttctggccgatacggtgaatgtgtccttcttgggaggtcatggcccgagagtggagggaagttacggagctggtgcgagaatggcgaacggcatattggtccgtgtcttcctcgtcgaagcaattttcctcaagctggctgctgttcagattaccgctagcaaagaaggaactgcttccatcatcatcaccggagtgttgagagatggtgtcgggtacagtaacagtgggcgggagctgaggaacaatacgagtctctgggtattcgtcctcaaagcgttggatcatcttatgcaaggtcacgtccaaaaattgcaggcggccataattcgcgtcattacccgcacgatcttcgcgaataagagccgactggatccggactctgatattgcgcgcggattccagcagatttttcgacatgtcgcgaggccgcttagtaggaacagctcgggacctgcggcgtcggggcgtcgtggtaccactgggcggtagagattgctcaccaagaagatccagaccttgctggtccagattcccgagacaaacacccaatgctttgacgacacccgtgccaccaataacataatcctcgtcgggagcggcgtcatcatcatcatcataaggctcttcggaaataaccgagtggccgacaatatgctgtagaatgtctggatatgggatatcctcaagcgacgaagtagagccaggaagctcgactgcaatggcgccgccttccagattccgcagcgagtaagccacaatctgtgatcctagagctttgacaacttcgttgttttctgcgctgggaacatcgatatcgactgcaataattgtccgtgaaacacggacagctgtcatcatagacgcatacacagcgcatgcttcttcctgagcaacggggtctgtagtggacgccaactccacaatctgctgattctcaagaatgttcagatgacacaagctggggcactccggcaatacctcggcaagaccaatgacatgatccggtgacaagttgacgtcagcgagatggaagcgcttcaaagacggcatcttcggcaggaagcgacggaaagcccccagcgcgctaggctgcgaggagaataactcgcgattgtgagagaaatcaatgaaccgaaggttgtggatttgcgcaagcgattggagcaatggggaaatcaccgacgggttgagcgagcaatccgccagactcagcgcataaagcggtgtttcaggttcgatcgcggctgtgagtagatcaagatcatcctttatagcgttgccacctagatccaatccttcgcactgtccagctttgaggtactcgatcacatgctccagaccctctcttgtcagaccattgttcgcaaagccaagtcttcgtagacccattttggtggttgcctggcagatctgctttacagcgtcgaccgaaggataacactcgctcaaaagcagttcttcaagatgatccccagcaaagcgctctgccagggcattcgcaaagaccattcgcacgtcggccgtaggctgggattggctggttgggccacgaacatcgaccgcaacttggcctcgagggaaaggaatacctgacaaatcaatagatttcagagatttcgataggtgcacaaaaaggctcatgtggcgccatccttcccgtccaattttcgggttgtctttcagagaaagcttttccacaacaccgtatcgttcctgctcagtggagtctgaagattccggtcttcgcaatcgtctccgtcgatagcgcatctgctctaccgtcttggtggcaagcagagctgaaaggatggctcgcacagaagtatctgtcaatgcacaattttcaagaatgagttcacgaactggaacgaccgcgagccaatcgctgaatgttgtcaaatcctgtgaggtcatcggaaaattgctcagatccaaagccgctaccgtgccaggtgactcggccagtgttgatgaaggcttggagatctcgtcaaccactctcttgagaacaggcgtctcacgtagctggcaacaacggcgatatatgcgcactggatcggttgtcgggtgactttgcgttttgggccgagtgacacctggcgctggaccttgagaatactcttcgtcatcgtcattctctgcatcgagttgtaacggaattataccgttcgcgactgcctgtcttcgctttctctccttccgttccttccgttctgcctcagacctcttcttcctctcttgcttccttgtgtggtcaatcacttccccgtttggagcagggtcattagatggcttgctgctggtggtatttgtcggggtagagctagactgggccttcgcatcgccggtggccagagcaggagtcgaggacgcgctattcttatcagccaatgtagcctggggatgcttcaaagcaccagcttcgtcttggtccttcaatttgagatcagccttcttagacttatggttagtagcttcagttagaggctgaggctgtcgtaattgattggttggaggagctccctcgtcatcgtcccgatgggagacacccgcaatttcaacatccacacagaacgctacgcggttgagcttggcctggttcaagtccgcaatcttgcatcgttgccgatttttatcgacattcatcacgcgacgttgagagaccacgacattgggattcaacttgggcaacccacccgagttggacgagaacttgcgtagtgcattgtgaataaaggagggtgatttgggcgatgtcgaagtaaaggactcttctttcctctcttcttccctgtccctcaaagagtaggcagcgccgaatgggttatgcgtatcaatggttggggttgttttcggactcgctggaggggccttcagactaggttgagacggtggggtagtcccagatgagaacttcgagcttagactggagatccacgagtttcgtcgtccgatgggcttagggtctgtctttcgcggcgctggtgatggcgtagatggcttttgctcctcgctcttctcaattggttggggtttcgcttgtactggcgctacattattctggggggctggcttcggttctgcggtggagggggctggcgttgggcgtggtggcgggttgctgttggaacgagatcttcggtgtgacttaggttggggggtcgttggctctgcctgtgtaccaggcttatcgcttgctgatactgactttgtgcgagacaagtgatctaaagactcaagagtatcagaagctatcccgacttcagatctccaacaaccctatcctggggttggggatgtgctggcataaaaagtggaactcacctttttgcgaatgatgaagccagctcacgtccacagtctgaactccttccattttgaaatcactcgagagtcaagagacggaacaaagtaacttcgcaatgtccaggtggttgtcgaaggtttatcagcggtgtggcgtcgtataaagaacgcaatgactggataggactagacagaacgacgcataattggctggtcccccacttttcgctgataatcgcaaaacagttcgaaaggagaatcaggtggacaacactaggggcccgatgacaacgaataaggtggaaatgctgggaaatgcgggagatggaatatgccgtataatctgcgaccaagagctcgccagatgcgttaaatcactattacagtaaatgacaacccaacatcatcgcctgtttcagcaagagatacatggtgaaatcatgcgaggggttactaaaagggatagagaaagtggcattggagaacttccgaatgcacaattaagcatagactaaggtgacataatcggggggagggggcacgtgagtgttctcattgggggagttaatataattggagtagaagggttggcgattggaccaatccggagaatgttcggctctccggtggcggaggacacaagaaccatggagaacaacatgtctacggagtacattattataaatcgtggagtttacggtggattagccgggagagccggggtgttagaaaggagtttggtttcgtaaaaaagggggaggatactggtgtcgaacaccataacgctcaatacgggtatccgcgatgatagaaacacctaaaaacgccaccatgtcctgggggaaaaacggccgggcagagacaacaaagaaaaagaaaaaaacctcccccacgcaaacccctcggaggggtagttatgcgatgaaaagaaacagtcatcacggcgtcaagcggacctcgggaactagggatattccgccgcacacaagcccctatctattccagacccggaatattcttgagatattcccagccatactcctcgtcgggtttctcggcttccatgccgagcgcaaagcggtaggcacgaacttcattctgcagaccagagatgacgcgagtagggacatcatcttcttcgcatttgagacggtaggcggtgcgaatcatttcggcacatttcatggtttgagcatgccagtagtcccggtcgagtcggctttccagatgggcgtcacgctcagcttggaggagattgttgtaatgcttcttctgagcaaggtagtgcatgttgttgttctggcagtaattgcggatttgctcgagcatgatacccacggcgtgctcaaactcccggaccatcttcatgttttcctcacgatggtatttatgatcggcactcacaagtttttccttggccagggcacgctcaagttcggcaatccgggcagctgctttaggcgttagtaaacgaagatgtgatcaatattcctaaggacatactaagattgtcaccctgctggccattcgggccagagctatcgacaataccgttcttctaaatgtgtgttagctatatatccaatctgagcaactcgaatgcatgttggcccacataccacaatctcctcggcattcgcgacgatgttcttggtcacatcccggttattcttcaagacgtcgctcagttccacaaccatctcatagagatgatgcaagtccatctgatggccagcgttcatcggaattgccgcacccatggcgcccattccgccgccattgatctggccgctgaccgaagtgtgggaaggggaaggagacggagtttggcgaggaggcatgttggatatgctcatcgcgctactactgttttcgacgtaacctgagaagttgccgttaccgttaccgttggtggccatactagacgtgttcgtgttcatagagacgtcggcgtcggcgaaagcgcgattcagttcctcgagttgagggtcgtcaggagtgaaggatttcggagtgctagtgccgttatcttcgtcgaaccaagaggcgtgattttccacgcctaggacctccgattgaaacttctcaaggtcacggcgagtaacgtgcgtggagcgacggcgatgcccacgcgtgaaagccttggaaggggagggggaagtgtcgccctcgatggtggcgggtgcactcaaaccagggacagtatcgtcactgtcactcgagtctgaatcgatagcaatctcatccacggagctctgatcagattcacaggtttctagtaggcagttgacaagcgtgttgtgctgggagctcacgctagcaggtggggctagcgacgggtcaacacgtgattggggtagctcacgtgatggtcccattccaacaagctccctcgtcttctcgagagcactcattcggatagaaaataagaactatgtggctgcaaagaaaatcaacaaaaaaaagtcatctaggaaagttggtttcccaacatatcggtggggcgaagcctatttctttccgaccggacaagtgtgtaagtgtaatggatcaatgacggtcgagagttggagagaaaacgggctctcgcccagtatgaaatgctcaaatttgctccggtccaatcacacgtgctctctgaagtctataattcaattcctgcagtcatacttggcacgtacttgccgttctcatgttttttgttgacatccatgaatgatgaggctggctatactagtgtcgccctgatggaaggtacatatggcaatattgaaacattgtagctagggcaacgtgctcgaaatccaagtagaaaattaaggaagctaccatcgaggcattggcaatgtgtaatcgtgtagtattgtatgcacatgtgggcatggggtattatagtttcgtcaaggcatatccaacagggcttgcaatctctgatcagaggctggaagtgagtaatcgtgagtttcaagggcaccgctgcttcttttctgttgtgcaatccggcctccaactctggctacgagcatgcgcattttctccaattcttgaacaagttctccatctttagtaataagattgggttgaatgtccttttggggatcttcaaatggctcgagtaatcgtcgaagatgttgcaactgatcaagccgccgttgccgttgctgcctttgactgtcgaggctcgcgagacgttcacggagctggaggtatctgtgcgacttggtgtaaggctggtggaacttcaatcagagaaaatccggatgtgtttgtaaactgaccttgcctgatcctcttcgcttgcttcctggctttccaatatgacaggcatctttgtgatgttcctaaatcattgtcagtgttgtcataccttgtatagagatggatggaaacgtacatcccccttgacaaatccgttgttttttcaatacctcgagcaaaagcatcccgacttcttgcctcttgactaaccgaagaccagtacaagtttgcaatctgttgggcgacatggtgtatcgcttgggaggaataaacaacgcgattgtgctgcttagcagctgcatttactatagtgctatgagtatcgtattcatcttgtgtatatgggcgcaaatccgtaaagaattgtgctgttcaattgtgatttgtgttctgacctttgtgtaggacatcttcaatgaccttgtcactcagatcaccttctgtggtttcagcagcatagtttcgccagtcttcgggtaaatcgaggctctcggagaaaatacggacttggctccagataaacgcagatttcaactcagatacagttcgagttgaatccatatcgaacaaaatccaatggtgttagagaagtaccattgttgattctccaaaagtcccgcgatcttctctgagcacgaccttatcgataagacatcacgtgtctctccataaatacgattttgcgggatggacaataacgatttgggtaatagaccacgataaaataagggaaaggatttaaagggtaacaattgaataatggtttgatctttcatacatgatcttagtagggtaataatgggaattcttggtgtggagtatatcctcggtctagagtgtatgtacctcggcaatctaaccgtccagatcgctttcaaagtatgtaatccaattcgtgcaattcccatcacaactcatttaatttacgagttagaaataaactgcagcatatcttgcagtgacccctatcatcactagcagcctccttcattatcatctcaagatggcagagatcaagcgaccggtgggcttactgttcgacgttggaggagtgtgtgtaagtcggccacttgacccataaattaaagatacatatctgacgaatctctaggttgcatccccgctacaagctattcttgactatgagattatccgaaacatcccatcaggatggatcaatttcagtatctcgcgaaccgcgcccaacggtagctggcacaagctcgagcgaggcgacatcggggtggacacggacttctttgcggggttcaatgcggacctggcaagcccggaactatgggcgcaattccaacagcaacttcaaaagaaacaaggcacaaatggttctaccattcctccaatgccgacggtggatgcagaatggctattctgggagatgatgcgggtatctcgcacgacagacccctatatttacccagctctgaagaaattgagagagtcaggacagttcctgatgggcgctctatccaacaccattatattccccgacggacatgaatacaatgaagcatccgaagtgaagaagcaattcgatttcttcatctcgtctgcgcacacgggcctccgcaaacctgaccccaaaatttaccaggtggcgttgcaggagatggacaatttagctaagagacgaggactagccggagctaatcccgacgatgttgtgttcttcgatgacattggcgagaacctgaagggggcgaagaacgctggcatgcgtacagtcaaagtcatacttggaaagacccaagatgcggtcaaggagctggagaagctcacaggccttcagttgctggaggaggacaaggcacgattgtgaggcgttatacatagaagtttgttatttcaagaagaatatcggaattatatgtagaaaggatgaaggattaagaattctatatcattttcttaattttcccaatttttccccattttcctgaattaattgtcgttgtttcttgtctttcccatggttaagaagttgatgttcactcgtcgccgacctcattttctggcgggggatgcagccacacgctaagcgaaatcccgcacaaagtcgacccacgaaaatttcccacttcctcttcttcgtccatctccagcgcccctcgacaccccgtcaaaatggtgagttcgatcgctgatggctgaaaaagccattatgcattccttttgcattttatttcctctccgattcccatcggagccgggtccctgcaagttgcttcggcgtaatttctgaagcgttaattgctgactcgcgatggtttacagcctttcaccaagaacgtgaagtccaacgcctacttcaggtgagttcaatccttttatcctgtgctaatcttttgggattttctgtttgctaacttgttttcaattatagtcgcttccagactaagtaccgtcgccgccgcgagggtaagaccgactactatgctcgcaagcgcctgatcacccaggccaagaacaagtacaacgcgcccaagtaccgcatggttgttcgcttcaccaaccgcgacatcatcacccagatcgtctactccgaggtcaccggtgacaaggttcttgcctctgcctacgcccacgagctccccaagtacggcatcgaccagggtcttaccaactgggctgctgcctacgccaccggtctgctccttgcccgtcgtgttctcaagaagctcaaccttgacgagcagttcaagggtgtcgaggaggctaccggtgagcactccctcaccgaggccatccagaccgatgatggcgagcgccgccccttcaaggccttcctcgatgttggtcttgtccgtacctccaccggtaaccgtgtcttcgctgccatgaagggtgcctccgacggtggtatcttcatcccccactccgaccgccgtttccccggttacgacatcgagtccgaggagctcgacgccgagaccctcaagaactacatccacggttcccacgtctccgagtacatggagaacttggctgatgaggatgaggagcgctacaagtcccagttcgtcaagtacatcgagaacgagattgacgctggtgacctcgaggagatctacgccgatgcccacaaggccatccgtgaggaccccttcaaggccgatgaggatgccggtcccaagaagaccaaggaggagtggaaggccgagtccaagaagtacaaggtcaaccgtctcacccacgccgagcgcaaggctcgcgtcgaggagaagatccgcaagcttgccgcataagcgtctcgcttcttatctttacgaccaaaagttcctaccaatatttcaattgagggaataggctactgccggcgttctattcatgtgatgtagtttttgacggatcatggcacataccactttttatttttactatcggaagggggttttttcctgggagcaattagttcggtgttattccaaggcaatttctttactcagttctaactgctccccaatgtccatctgtcttgttccctcatttgcctccttgcatttgcctgtagctgggacctttatagtgtagttgaacccactttccatcttgtaactattcttagtattgtgttatgcaggcgatattctgtttattctgatcattatgtttatgcacgtaattcttcgtaattacatcatgccattgtggttcgtcccaggttaaaattagatcgacgccatgcacacaagcgccaatgccgatatgataagtggctcccaaccccacgagtgcgttgccagcgcagcaacttagtggctgttcaatgagcaaggatcaccccaaaaaataaaaaagagcgctagatcgttccattgcctgccatcaatctccgctttaaggggccgttggatccccgaaaagatgaacctgcaattatttcacctcttgtatatatatcccccacctacataatctacacatcccaccatgaagagataccagcaacacacccacgcaagttggcaccgcgcctacacaggcaaattcgattgcccctggtgccaaaacactcaccggccagagagcacaacaccccagagcccgaaccacaacacccgcaaacccgcacaggcacaggactcagacaatggcaggtccagcagagcgaatgcgactccgacacctgtaggacaacggatagctcccgagagccccgagagccccgagagccccgagagccctgagagctccgacgttcctgttgaagagcaggctgctggcacaccgcccgaaccgcagaccccagagtcggctccagagtcggctccggacgtgaacgacgaagagacaccagagccggaatccgagtcaacttatacgccgtttaatatgggacggacctcgaggcacgggaataacgcgtcgcgtccgccgcttcccgaggagtggacgaaggaggttgaggatcaggaacatgggtaggagattctagctgatggctttggtcaccgctggttcgtcactgtgctgacgtgtttttttttcgatagtgctgcggaatggaatccaccgactgtggaaacttagcgctttgggctagatacgttctagggagtctcgaatgcccggcaaccacattgactctcctagaggagtctcgagaaagacttggttggaatacatcgagtcgaaacattcacattaaactacagatatcaggatcttgcttcgcacaagtttctattgtacataatttcaccaatctattttgactctaatcatacccccttggcctatcgtcatcagcagtcaactcgcttgatatttcgcaaatggcctccggcgttaagttcagtcctgcatcttgcaaggtagcggatcgtctgggcccgttcttccgtacattcctcgaggaggcgcgtggtttgagaactattccgcggtagttgattaatgagagatttagccaactcatagtcgcctgccgactcggtttctgtggaattcacccatgccatttaaggttcgtatgagtcgtcatcatcatcaatcatcagcctgggccaccagtgaacactctgcctcgtcaatgtcaccgagagcctgttatgcactgcactccaatgctttaatggcttctttgttatcttcactcgatcccttgcgtaggatagctttggccttatcgtaccctttgattagctctgctcgtgccttgtctaacaagttgagttctttgtcgatatctggacgccgagatcgaggttgaggccgaggtttccatcccagaccaggggcagaaccagaaccagcgtcatcatcggagttggattgaaatcctgttggcttagctcgagcggggtttgcgtaccaaaccttgtcacgagcaccgcgcatttctgcagccataatctggaataccttgcgaaaatcatcgggtttttcccagagaacacctatccttctctggttggcgcgaagcaacccacgatagtgaccaattctctgcgggttgccagacatttctgcatccgaaagctcgttgtcaagtctcacttgctcaaggcgtggatcggagtagtcttttatgatctggtcaatcaagtcacatggatcgagttcttcgtaagcccatgatatccgtattcgactgaattgcaatgccgacaaaaggaaactggggtcctcgcccttaatgctagacagtttagacttggccatagcccagtcttccttcaactcagcttccttggattgcttttcaagctctttgttagtgcggatttgagtttcgcgacagacgtccaaagccttgaggagaggttcgaggattttcttgtcagggatctgaagcagcagagacttggctttatcataatcatattgctcttttgcttcctggatcttcgctataaggtcttgcgcagactctgtcgtgaccaaaggttgagtatgtatgctgacagaagagctagccgggacgctagccgggccgttatgtcggggtcgcgaggcatgatgtgtaggcaaatcgtctgtcgacagggataacatgttagtatgtcctaataacactccacagcaatgatacaacataccatccgaacttatctcgacatcgaacccagtctgtgagaatgttcgcttcgcagcgccctgcgcaagaatgatttctaccgggattttaggtaatccattcacatagctttgcccagaaagtcttcctgcttggccttgaaccactggcgaccgcgaactcgattgagccatgttgcttcggttcggatgactgatggcatgtatatgggaacgtaattcatctatgagtggtgccagttgaggtccacgatcacacgaagcctgggaacgtaactttgtttgtaccagcgtcctgacacgtttccagtgccagcccgaaacctcccaaaattgatcagcaacacgatgccagaagtcgagattgccttgcgattttgtgtaacggcttttgtgcacaatgcagatttgaaacagaactagctgctgatcaaggctcagcgacggcaattcaggtcggtcccgctgatactctcggatcaccgtccaattaggggtcataatgcatgggtcgcgaggtattgcaggcagtgacgatgaggatgggctagtgcctggacaaccacggggctctacctgcgtagtttctgacggagggttctcagcaatgtggccttccccagcttgacttcgagatgcagttggtgatcgcatggtcggagctggcagacagtaccatgccctgtcgtaggtatcgcgcatatcttcagccatcatctcgaacaccttgcggaaatcatcgggctcgctccagagaacaccagttccaaacatcttttccccaacaaaaagactatgcaggtcggtggctctctctgggggcccattccgttctgcatgttcaaagtactgtgtgaatttcacctgttcaaggcgagcatcggggtatttcttctgaagctgaacaagtatttccatgtgctcgtctttgtgcgtcaaacgtgcctcactgtatgccaatgccgcaagaaggaatttgccgaaatcgcttttgatacgagataggagagacttcgccccctcccagtcacccttcatctctgcctctttggcttgtttttctaaatccttgtccgcctcgtaaaatgctgatcgctccgcttccaattttctgaggagtggtccggacaccgtcttcttcggaatcaggagcagcaacctcttggcttcattccagtcaccgcacaatgattcttctttgcttcgtttttggaattcaatgtcggcatcacttaacggttcctcgggctgtagcaagctcacgacttcaacatggccatcgcacctctctgtactgacgccggctgatgagttcaagaggattcgtccaaagttctcgccatccacttttagacgcagagatagagaagtggctttatcttggtcctcattgtgcagggcttccgcgaggtccactatgggctctaatgccatatggaccgatgccagttgtggatctgaaagtatagacttcgcgccgctaaagtcacccttagccaaagcctcgttgcacttgaataatgccactaatgctttgggcctcttgcctttcatcagagacaccagatcacaggccttagtcaagtcacgatcaacaaattgcgccaatacagtctcttcttgaaggcttctgttgtatttgttttgtatggcttgtctcctttccaacgcgacaaggagccggcccgatctcaccttgttctccattgaaagcagcgaggatttggctttctcccattcaccatcactctctgctttagcgctttccatttcgcgctgcttctctatttgctcatgtagacttttattagactcaaattccttgatgtatgattctggtttttggttgtctttgaattgaagcaggagccacttggcctgatcaaagtcacagcgcattgctgcggacttgacccgctccaatatggcttcttcgacgtcttgccaagtcatatccaaatcagattgaggaagaggcgttggagatcggtatctgtaatcggagcgtctcagctccgaccgccatttgatgaaactgatgtgttccatcatttcccataaaagtgattccatccggtaaccatcagggtcgacagggcgaacagtgtgatcccgatagcggtattctgagagctttttttgaacaaaggacctgacccgttcttcatgccagccagaggcagcatggaaatcatcggtaacagagaaccaaaaggtaagattcgaggacagccgcgtgtataaatgtttgtaccgtatgcatattcgaaggagagctaccggcgaaggctgggagccctgtgaaactgatggagaagtgtcccaattcctttccttttccatgtgccggactgcgtactccagatcacgtctccacatcgttgaagggaatgatacagagtactcggtactgccgacggagataggattcagcctagtacgtcggagatgaattaacatacgtagaagtgacaagggatatttttatactgggtaactaacttggtatagctgtctggtctgacatgaggacaatgcgacaggggtggaagcaaaacccagttaagcgacggttggaatgtgcggaggaagatacgcgacatgcgacgcgacgcggtgacccgacctatagtcactctaggaaggagtctagggactggacggtctactccttatcggagattggtctagggtaaaaaaatgcgactgttcatgcggagaatacatttttgaaaaaccacagttgaagtccaactggaaatcgcggtctttaggaccctaatgcaggtacgtctatgatacccactggagagctgtatcctttcgccattaaccgcctactcttattttttagttctcgctattaacatttaggcttggagagaataggaaataaaaacttatagtataggaaaatcaggttaaattcggtggagaagacgggaccttggagatgggactagggactaagatattcccataggagtcctatatagatctctacagatgactaggaactctatccgcctctttccgaattattttcaaattgtcaaggaaacatcacatatttccaatccgaaagagctagagaattgcccatgcaaagcccgcttgtcagtagccttaaaacttgctactcagtgactgcagttgcaacaagccttgcttcttggaaggttcctcgacgagagcaacattacggacgttgtctgctaaaggaaacatatatctcccgacatccacgcttgtaggccacgacgctgcccggaatgcagcttccgctagctttatgagcattagatcgcttccctttgcaccgaggatagtgctcccgatcggtcggtgttcaagtcttcctgagattcgtgattgatagggcatttgtccaactagagacgatcagtaatttactccggaattgtggccaggaaatgagaagaaagaagaggataagcactgaaagtactgacaaggtagcacaagctgagggattccaaggacaggagagatgaatttttcaccaatagttccagcactcgatgggctcctaggtctagtcagttctcaagaaatggaaaacccggggaatggggaacgactcattagcgatatcccggtacttcgggttagcagatccatatggcataatcataatggcatcagacagggtgtttggatcttgtgagaagatgttttcgtcaaaccatctctggaatactttcagttcttcacggtatgcattgtactcatccagagtaacttctttgccaactcccctaacacatttccggttagcttttctccactcggtaaatttcatatcttaccatctgtaacgcaaaactgggccttcaaaagggagtttctcatatttagattcatacttcgatcggaagtcgtcaaatccgtgatagtaatcatagcacatagaccagaacgcactctgtgtaagctaatgtaagtttcacatcgcttcgaactggtgaatgactggattaccaaccttggacaggtactgcttcagtggcttcccgttcgcctccaatggagggcacttttcccatctctcagcgatactaatctcgacccgcttagtgcccaaaaagttctcgaggatttcaacaaattcatccaccatagcttggtgctgggggttgctgtgggggaaaaagtcgagtggatagatgatcttcgacggaaatgccgtagagttgtcgttgagatccaaagtatgagaggcaatataatggagatctgacaagcttcggccgaataatcccacaacatcgaagtgactggttatgaatgaatcagagaagtcatgtggaagaattgactagaaactcacggtgaattcaaaactataccatccatagacgttgattcagtagatggtctgatggaaaatagcccattgcaagttgcaggtgccctaatactcccagcagctggagtttcaaatatcaatgtctttggttcgaacttggactccgggtttgaaaaagaaagacttacagtcaccaccaacagaagaatctagccacgagtatcctgctaatgctgcagctgaaccagaggagctccccgacgggctctggtattcgtcgccacgggggtttatggggcaatggaaatcaacccactgatccgtaggctcatcagaggatgcaaattgagtcatctttgtctttccaacaatgatcgctccttggtcaataagcttctgaacgtatgaggcagtcttctcttgaggagggtacagttctgtatatgcacgactcatcatggtcgtttttgttccgttgaggtggaatatatctttcaagcagacccgaatacctgcaagcgggcgttctggcgagacacgtgaatagaggcgactaggcactgcgacttctttccaaatcccgtcatcactgatagaactgaaaggattgaacctaatattgcttgttagagaataaaccgttcgctttcgccgcactcttctgttgtgaccttgagaacaaacctttcgggctggagaacattttccggcaagactccaaaaatgaacgcgtcgagacaatccgggtataggcgccaggcttggtgaatattggagccatgaagaaaataagggcccgctggcaggtcgagcgcgctggacgtgtacactgtcgaaaatttctgagatactaaggtggatttaccctgattcagttcttcaggagtgccggttaggactattgaacgtgagaattctctgttgtagacatcgtctacctgttcaaagagattcagttgctgcataagtctttcagtgttttcttgcactatctttgcctcaagaagaacaacagctttggtctcttggacgtgaatattttcaagaatagtgccctataagaacagctcaatataatcctccttaggatatagacgaaagcttaccagtgcctgtgggtgtacgagatatttagtactcgcaattatttgcgttataatctgatcaaaccccatctcagctatggggtgcggaggcgcgcaaagtggggataattggggataattgacttgaaggatagagaaaaaaaggaaggttgaaatattcaatgaatttgacacagtgctaaaggtcttttcgggactaaataggcgtaacgcggaagctcttagatggagggggtcgagtctgcccaacgaggctgatctcggtgtaagaaaaggcctagaaaatgtggcatgctgcacaataatctcaattcgtcccatcttatgtgcatgtgatagtactggctagcagacttgtttattaccggccgatatgggaataatggcgggacatcctatcctgtgacatctcgggtttagggctgcaggtggtgctcgaagaagttagccagcctcttctgattggactactatagccacgcagcaaatgttcacagcccccctcgtaatatacaaggatgtgctttcaaatataccctgtcactgcccaatctcatgcgtagcgcccgaaggcgatgcgaacaaaccggaggctcaaacagtcctttcagcgtctggactttgttatgcggtctctttctccctctcccgctctatctctagccataaaatcaaagccctccaagggagcaaagactaggctaaagttgctctgtgttaatcactgaatttggggtatcccaaggtcgtcagtcccaccggaactatgattgctcccctttcggttgtctacgacggtgtcagaaagcctgagattgagtaagttctcctctgttagaaaagaagttttgtcgaataaactaaataaaataataatagccttgtctcaattccgggccttccaactatccatcctacgtacaagttgaaagaccacacgaaatggcttcgggaagtactgagccatcaggtgccccaagcgcgaatcatggcatttcagtatgattttgcaaaggattcaatggaagtctcctgggcggaactatttcgaaatgttgaatacctactatacagtttggtacatcggcgcgagggcacagaagaccggcctgtcttattcatctgctacagctttggggcaatcatcctcaagaaggcaagtcacaagtagattatttattccacctccataattcgtagctaacattatgtatttcttgatcaaggctttgttgatcgcaaagaaaaccccgatattccgaaacattctcgacaagaccaggggtatcatattccttggctgtctgaacgatgaatcaaatccacaaatcgaggagctatgtcttaaatgcgctgcggtggagctaggagtgatcatgaagaacaagatgatcgacaccctgcgaaaaacggacgattggacaataattcgagacgtgatagagagcttccgcgttttgagatgccggttcccggtacgcaacctctacgaactcaggccgactaacattatgagccgtacactcggagtcaagaaagtaaagcgagaaatggtagctttcacccgagattaagtgtccaggttgatgaagctgatgagctaacattggtcaaagctatgcgatttacgggtatcgtccttaggttggtctgatgaggattgcgtgggcattgaaaaggatcatggggaactcacaatgtatccactcagaagcgatgaagatggatatttcgagacatttatgcgcacactcacgagaatgatcgatgagattgtcccaaggccaacgcaacaagcatgggaaagaaatgatcccgacgacgaccaaaactggcttgtgatggaaggaacttctagcaaccggtctgcgaatctggagggtatgttaaccctcaaaccatgttattttcaatatcttatctgacatatttatctccctgctacctttagctgatatcacaaagtcgatgttgtcgtataacgactcagcttcatttcacacatcacatggtactcatataccatgttatgtcatgaccccgtttgaagataatcccaatttcgttggaagagaaaaaactctcactgccatacacgatgccttggccccaggtagtcctagcgtcggacaaagggtattcgcacttacaggcttaggcggaatggggaaaacccagacagcagtacgttatgccttttcacagatggaagtgacctacaagattgtgctatgggcacacgcagacgggcagtccaaactttcagagagcttctctcttttcgcttccgagctgggtctgggagatggattgacccacgcaaaagccaagcaagcggtcaaagactacctcgcgattgtcggtaggagctatcaattgaaaccactattgattctgatctgacccttaatctagatgtggactggctcatgatttttgacaatgctgatggtgatgataagacggaactgctagcagaattttggccccgaggtgacaaagggtctatactaatcactagccgcgacaaaactttgacaaatcggtaccatgggagattcttaaaggagcttcattcaaaaaacgccgtggatcttctgctgaaactcactggaatgcccaccactaccacagaagagagacttgcagcccgcgaaattgtcaagagagtaggcttcctaccactaggaataaaccaggctgcaaatttgatcataaatctctcatgcactttctccgaattccttggagcatacgacttgcaagagctcattgaagactcgtctgatgtccagctcatatcggggggttcttacaagtactcgcttcgaacggtttggaacatgaacttcgagaagcttagtagtgcggaccaagctctgctgaagatgatctcgtttcttgaccccgatcgcattcaaatgaagttgctcctggaaggaggagcagagagcgcgaatccaaacctgcacttcattaatacttcttacaaagtgaccaaatgccgggcagggcttttgcgcagctctctgatctcgcaaaatgaacgaaaagatgagcttcagatgcatcgtctcgtacaagcatactgccaactcaaagtgtcaccagaagaagcacaacaaagttttggcaatgcaatctcgctcgtgaaacaagtctggccagtcccgcctcgatcagaggtgcataatccatctttatgggagagacaaagagctcttctgccacatgttcaaaagttatgtgagttttacgtggcatcttgccgaagagaccagcctcttatcccaaaagacgtcgtgaattgggactttccttccgtggtatacgaggcaagctggtgagaaaagaaactcttaggcttgaaagtagcaactaattaattcaacattcaggttctgctacgagagtgggatgctagagtctgtttcagacttgctgaatcccgcgaaggattactgtatccaacatttggcttctggaaggggttatcgcctgttggcagatatatatgggtgcttcggatctctatgcacagagtcaaaccaatttcaaggcgcctacgataacttcgccactgaatggaaatatctcgagaaagctttcgaagcaggggagcttgaaagaccaagtatttgggaagtctttggtttagggaggcttggaaacgggcaccatgggctgcatcaatatgcagaagcagaagcatactatcgaaaggcattggccgcctgggaaaatcttccaggtgataagaagctctggcacagtcatcttgcaacgtgtttgtggttacaaggtcgcccagatgaaggagaggtagtcgtgcgaggagtcatcaaagacgaaaatgacacaaccaatttcaggtaggacctagagttcacccctggagaccatcggtattcagtgctaatgcatgaagcctttagaactgcaatggcaatgtatgcactaggcaatattcaaattgcccaagctacaggtttgacactcgaaggaaagaaaaaggacgccgaagataagctagctgaggcaatgaatacccatgtcaaagtactcaatttgtggacgaagacattgggaccaagacaccacaagacctcggatgcaatgtacaaggtcggctggcatttgcacagacgccaggaatatgcccaggcattgtcagtctctatcgttatttctcgcctcgatggcctttctgcgtgcagtactgactaattgaattagggacatgttcgagagagcgttggatatctatgaaagtcagccgcatctatacaaaaacgaaattgcccgaacgaaatacaagataggctgcctgaagcaggatacacagcatcatagtgacggtgcagctttgatccgcgaagcggaccgaatcagacagcagatagtgccgccagaagactgggagcctgcgaagtgcgaggaggactttgacaatatagtccagttctggacacgataaatttgagagaaatggagttcggcagtcacaaaaggtcgcagcagagaataataggtcaaattgtaagagcaggtggcaagtgggaaatctgaattatctatcattcatgcccaatctctatcgtcgaaacttccatatatcggcagtaacatgataattcttgatctttctaatccattctggtccgtaaagaacagaaagagtcaaaagataaatccctattccacagccaaaaggccattgccatgacggaggaggggaccattcccgtatattcatgccgaagacaccagtaatgaagctcaacggaataaaaaatgatgccattctggttagcatattaacctcatttgcactttgcacccctctttccgagagcacaagctgtgcaaatccaaccagaacgcttgtggccgactcgcaatgaccagtcaaaagtttgcagcgttccatcattcgatcatagtctgcttgtagttttctttgaatgagttcttttcgttttatcgtggagtcggaagctggctttggccaagatgagcaacctccttcagtaataatgtgctggttttccgagagaagttccttgacccggcttatggtagcaacatgttgcctaagctgacccaactggaactgtagcttatcttgatcgacgtccagctgatcttggcattccgtaataccttgggcaagaacattcaaggtctgtgaccaggaaagaaatgacgtggtcagaaccgtggcaaggaggaagaatggatcttcttgcattaactgatagtccacctgatccctaagaactatgcctttgaggggatgaaactggtctagctgtccggatgattcaccatcatctctgctagggatcggtgcgctactctctgctggcagattgtaaggcaccaatgggacaataccaccatgtctagaccatggcagcccttgttccgtgaccattcggctactgtcagtcagaaatatgcctaaatttttgattagctcttagagaccttcatgaatactcaagctccaggccccactcaccatgccaattattccggtgcgtcgcaatagtgaaggacaccatctcctccacactgcatatgtcactatcatgcacaacaatctttcggacatgtgtggccccatacattctgtgattgaccaatgccttctcatagttgagccgcaggccctccatctcagctcgtttctgacgcatatgcagcgatgtttgaccggaaagacgggacgggtaaggagacatgggtttgacgaggcgggaaaagtgcacgcgcaccacattatcctgtcttgacggcagagttggtaactctggaacgctgtcactcagcttgaggctgacaggtaggtgctcgataaagaattctgggcggacggcaaactcggctcccagaaatgcgatgcagtcaggatgtgggaacccttgcaataccccaatacgtggcttgcagttttcatcatgcagcccagtagtgatgaacgggaaagcttttggatatacgtcatcattggagagcgggctaatctcaaataatttgacctcctgaagtctggactttcgttgcccggaacatgcatcaagaaagtccgccagctgttcgtagaaggaagctgcttctgggtgataccgataacaagatcggatatggcgtagataaacagaacggtcgtcggtgctgcttgacatgcttgagtatatgtcgaagtaggaataagccataaacaggaacttggtttttgttatgttctagtggtaaaatgcgctgcatggtttccgtcagtatatacaaaggcttcgagggctttgtctttgtccactaggtaaaaatatccaagatacctagcgttgaagttcagtagtggtgccaatctactcttgtttctcgtatatatttaattggcttccgggcagtgcaatcaatatattaaagtcagccactatcccactgccaccttcacccgggcatagttacgcccaccacatgtatgagttcaccaataatacatggctcccgtacaccttcccctctttcccctctttcccaatgaaattgttgatcgtctgagcgataacatcgcttcactttcgtgatggtaggtcttctccacctgctgtcgagagtagataaatagtggtgcaagcacagggctgatttacttttggcctatttgggaatcactaccatcttctcttccaatcactctactcgagattccttgaatcttgcttcactgcgcagaattcgccatccaagggtacttgatcgcaacaatgcatccacatgtggtacgcttactctagacatatggtgatatctagtaattctgacaacagctatttcagactcagcttgtctcaagcggcacggagtataccgacactcacgtcaaatcctgggctcaggatatcctgaataaggcatcgcaagatactcgccaacagccgtggaagcgtgcttttgccgcaaaagaagtcaatgttttgtccccgcaggtggccgatatcattaaatttgaccacaggagcgcctgtgctaacgctgaggctggaaactgagatatgatttagatagctatcatcaaaggggttggatgaagcattactatttagtcacttgaagtccgttgaatgtgagattggaatatgtagcaaacgtgagttgcctagttaatatgccagttcaatctatatgctgatttccattcttttgtgttttggtccaataaatccccggataaggctcaagtgaccacgtgtaaagttataaattaaccgtctccccccagggccgatgaatgccaaagccaaccttggaactattccaacgcttaataagcagatctgtcgtccaatcatctataagagtcatggagagaggcatatttcgctatctcaagtggcaggagctatacaaggttgaaaaacctttccaggtcctcattgatttgcctgaggatgctgaactgaagcggcaaacaaatatggaatttgaagatggttcggaggtgaccattacggatattcgagccgttcaaagtcgcccccagattgacacacacggatttacatatgcttatcacgatagtagtctcactgaagaccagtttcttgataaggtaaatgttgagtcaatatatcttccagagtgtgaggcactgcttcggagctcattggatggggtcgatgagatccatttcttcaattggctggtattaagcatacaaaagtttctccttgtggatatctcattgttaacacatgcaggtacgagataccagttctgttctatcgggcaaggaggtagatttgaacaatcctttggccctggttggacctgcaagagtcgttcatattggtaaggagtgtgacactttggctggtctatgtagcttctttcaagctaactttctgaagatcaaacatccactagcgcagtagaaagggtctatctcgagctgccatcaaaggcagagaaacttctaaaaggaagacttcgtctgattaagttggttcttccttcttttacgtgagtcaatatggtcacaggacatatgttgatcataattctagcttatggcgccctgttaatggcccagtggagaatttcccactcgccatgtgtgacggtcgaacagtgtcacctactgcacgagtgcagtcagatcgaatcagacggaaatataccggaggcacaacttttgtgttacaagagtctgagcaaagatggtactacctcagtcatcagaaaaataatgaggttactatattcaagaactttgattcggattatgatatgacacaaggtaagcaattgcgcataaaaagactattataagcaactgacatttcataactagacgcccctcattcatccttcgtgccgctagttcatacccctgggattcggcctcgccgaagcatcgaggtcagagcgatggtgtttacatatgctccgaattagttatgagatatatggcagcctcaaccatccgcagtttggatgagatttaccatgcagacagacaagtttttattttctcaagtgtaggatcaggatatgtactgggctgaagggcaagaacaatatgggccatttcgatcacctaaggagcttttgtttgttttgttttgtttctaggcgttttctgttactataggcctatttagtccaatttttatcataagataagcttcctaaaatcatggtcattctcctaagaaacgtactatacttaggcgatactagggctagccagatctaatagaaaaatgatgatcatcggttgttgtttaatgtccatctctcgagatatgggcgtagcccgtatctctacggcctcctatgggatatggggacgtactaagctatggttttatgtacaataatgagcgcccataggaaggaactccttctagtgtatgatctggcgtacggccaattggctgcccgtccttctgatgattatcggtggttgtctcgggcctcttttaacctgagtacaacctaaaattgcccccaaggcagtgggaaggacaggtgcagtgacatatatatatatccagtgtctttggtacttgttggaatggcagtgttgacaggtgagaagctaatagcagttactgtaataggcaatactccagacattggatagttgggatacgaggtgatggacaccacgggtttgacacaatgagtcttactaagctgtaaattgatacagctcggaacaatcccaggattgcccaacaaaatatagtcatttggcaatgccaagacatgttcgggcttggcaaactgttttctgccaagacctgtttatgtacataaaatagcctaaaaggggaatttctacattacttttgcataatcatgccttcaatttcaaaacgaccatggacatctctagcattggcgtctagactttctgacaaagcacagatacacatcttttatttggcgagatcgttggatctgaggcaaagagacagaattgcaaagaacgttgtacacaggttgcgaaatcccatgagttctttcttcccattgtaaagtgcttctatgtacattgtctaatatatatccccactcttggtatgggctttttacatctgtcctgctggttcccatcttgtgataagctacagatatctggcttgggacaggaaatgtatttacaacatggtccccgtccgatgaatattgtatcaaatgctgtggtgagtcaattgccaatcgcacttagtccagccaagaaaagagcacgtcgtaaaatgctttggggtcttggaggaagggtgcatgacctagaccggggaacatatggagcgtgcagttagggatcatggctgcggcagcagggccaagtacatcataatgtcccagcttcgcagcgacggcagggggtgaccatgctttaccaagtgccgaaacgtcactggcgcccaccaagaggtaggtacgcgtctgcaggagaggcagctggtagatgatcggctggctgagtaaagcgtcggtgacgagggccatcacgtacgaatagtcggagccatagtcgccggcgtagatatcggctagcatgttgacccaggcatcatattcaggcttccagggggcattggggaagtagttggcctgctcataggccttgagagtggtaaagttcgacacaataccgctcttgtacgacgcgtcaattgataggtagggcacacccttggctacccaatcctccaagcccagtggattgacgaggaaaagctgttggatgctggccgggtacatgaggccgtagcgggcggcaatcatgccacccatcgaatggccgattacggtgacttgatcgatgcctagcgcagtgagaagactgtggatattcaaagcctgctgttgcacgttgtaagaatagccttgaggcttgctcgatttgcaaaagccgatatcgtcgggaaggatcactcggtagccggcggctgacaggtgacgcgctgtgtcggaccatgtgacgccgcagaagttgccgccatgcagcaagacggctgtcttctgagtcttgttttgtttccttgccgggatgtccatgaacgccatcgtgaggttctggcgctgattggagaagttgaacagcttcaccggccaagggtaggggtaactggatccgtataagtcggctggcacatggccatcgtagatggtgccaatagggtcggggtcggactgtgcgcagacgacagtcgtacacgacagaattgccgagaaggcactgaagatggggaatatcttcatgatgtggttgcttgaaaaaggacgaagttcgaagagcacggctccctgtcaatcgtataagaggaaaatagacttattctttcacctcctgatgcgatatataccagcttgagaattattttgatgtgaaatgaaggcggatcccagtgtagctagcaccagagctaggggcaccgcgatgctacctatatgtagttagtgatctaggggctgatcacagcctttcctgtttcgcttctcagccggataggggcttctcaaatgcaatttcattagtaccaacttggtgtttttaatcaactgaaatttcactagcacgtacttggtgtagttaggtactgttgaggaggggcccggggtgcctgggtggggcgctgtgctgagtaatggccacctccagccctggagggatttcgatttctgtcttcccttaagcattcaacacgcagattcttcttgatttcgttcaaatgagttacttttagtatttcccatcatataaatgtacatctacttggttgtcgtcaatcgaccatccaatcctgggcaaattggcccccaaaatttctcaaactagcgccgttaacgccatgcagcgtgaaattaatcacgtatacatctttgcgacccccgcctagcgctccattttttcttctacaagggtctcggatgaaacgggtcaatgccccgatcaggccgcgcgatgtaacctgatcccaaagaatcgaaaacttccgcgaataggacccttgtcactctgctgcataacacgctaacacgctatcccgccggtaacgcggtaatgtacttatgtcggggtgcaaaaaaaaaaaaagatgtaggctgaaggcgacatcactactgatacggccttgaattactacatatgtatcgaccgtcgcctcaatcgcttttgcaagaccatactacccacccccaggcgacctctagcaatttgctatgtccaaaaataccccaggaccaagcagggcgttggagatccaagtgccatgtatcgtgttcctcgtgaccacgccggctttcgtggctatacgactgtggtcccgagtcaagtctaagtcggggctcggctgggacgactgtactattttggcgtcttgcgtgagtttttaattcaagagattgagcttccacatgcagatttaacgctcctatcaacagatctttgcgattatcgtcatggcttttatgctggcgtcctgtgcctatggctttggccaacacatcgcgaatctcacaacaccgcataagctaatgactctgaaggtacattgggaatccttctcactgcagttttctcgttctatattgtggctgaggatcgctgacttcagtcctgccagctcttcttcgttagtcaagctttctacaagctcaccatgaatatgacgaagatgtccatcctgatgctatatctacgcatttttatccagcgttggttccggatcacctgtcatgtgctcttggctatcatcacctcctatatggtggccaccttcttcgcctccgtatttcaatgcacgccagtggcccgggcctggaacaagactatcccaggatcatgcatcaacataaccactaactggtatgccaacgccggcttctcaatcgctaccgatatcatcatattgactctaccgatgtacccgctctacacatcgaaaatccggttgaagcggaaaatcgccttgatgggagtgtttgccctcggcaccttgtgagtttcaaataccgcagtgcaggcgttatctccagactgacccggagttttcaagtgtcgcgattacaagcattctccgaatgcagacgcaggacttctcgtccaccagtcctgacattacctgtaagtgtcctcatagtcaccccgaactgctcttactcaagcacttacgagatctacagacgacatagcctcctcggtatggacgataaccgaagaaaatgtggcgattacctgtgcctgcctgccaatgatgtggatgccacttgctaggctctttccctcggttttttccatagatcatggggccgacagccatggaagctcggctgccaagaactcggaacctaacaccacttcgcgtccccgaagcaactggacccagcttcatgcgtaccctgataccaagggcatcagtatggaccaaaccagcgattccccaaaccgctcatcggaagatagcgcgggcgagggcggcgaatcccaggatcaaatcgaaaacggcatcacgaaggtcacggaatactatgtttcttattctaatgcgaaatcgcttcgaggaaaatatatctctaggcccgaataggtcgaataacttgtggggtcctaggcacacgatgactgagatgtgttctgaattatcgctaaatccgtgcaatgaataaatgaaaagtataattaataaccttatcaacaaacagtcaattgttgtagtttgatcgtctctttgctttccttagaaggctattacaacatagtctctagattttgtagtagaagcttagtgaacttcagaagttcaactacaatgtacctaggtaatgagagagttatgccccgggtggcatacttgacgcccgtacagggacactgagattcccacggttgtcctcaacaagacaatatgggctttccgctaccgacggagttgacatgcaccattttggagtacatttctcacgacgacccccatttagctaaatatgcaacaattagtcgcgactggccggcgatcgtcgagagcagaacattctcatacctcaatatcgagacctccgagcagttagcggaattcaatgagctatcatggggtcaaagagggagctatgttcgaactctccatttgattgttcaactagagtcttactatgatgatgatggcgacgcgtgtttgcgctacgaaaatgaaggggagatgcaacgaaacaacaagctttttgacacatcgactcagtcatttttcattactctggccaaatggccaaaagaaggcgccggctttagtctttcgattgaggcccagtcccccgatgatattctagatcaaacgcccgaggacaagaggtaccgttttggtgatttccgggatcagagattcgaaagatcataccttcaattcaattcggagatcgttgctatcaaatggccggccatccctacagatatctcccttgtaatcataggcgggcatgatagaaggcaaattgaaccagcttcttgttcttttgtcgtgtcgaagttacctcgactataccgcctgaaacctaatttgaatgatcattatagataggacctggaactgagaaaacgctgtagaaacggtatactatatgacaatgcccggtaggatataatataataattggaaatctagatttcgcggattctattctactatggtatgccagtatacggcagctctgccttaacttctggtttagggcccctttcaattaagactctttcccaccggatttaacggtaaaaggaaagccagatatactaagcttgcgattgcgggagttctcgcaataattgaaagtaatgagcgtgacctaatttgtgcttggaaaaaaattcttctagcctatagataaatagaatcacaatctctagcttcccttttggccctatcttaccgatctatcggtgggatacgaaccggtgactccaagtggaaactggatattcgcagaggaaggagcttaagaatccgaatataaggatgattatcacttgagtgacccaggctccgataatgagaaggatgagaccgatgtaaattggacagccccggaggaccgcaatagcagaatatttcggtgtaagtacattcacgagacgttcgatgtgtattatctctcagctgccaatgccgctctttgtatacccaagatgaataatatggttttggaagtgacgaacgcctggaatatacacaagttcgtgtacactgtgaggaatggggtagcgaatgcgacctggttccatccctctgcttctacgagtgtatacaggccaagcgatagagtcttacaagtctggaagcaggttgcttccgcgcgtactagaggttttcttgaagttgaaattagccacatcagggggaagtttcattcaattctgcaaagcgtttacacggacgtcactttaggaacaaagtgggatcacgctgcaattgacaaccgacaaagagttcagctgtagtttacgaccgaaaagtaataggagcgaatggggtggtcggcgagtctgattgagcgggataccaaaactcatttcgtacttttgaatcattcaagggatcaggaaaaagctagaatacacgtagcttcagcaagagagatttaaaacaaacatgagcggcaacagttgtaggcatctctctcaatgttttaccggacttcgattctcaacggtgaagggaggattgtaaggaaagggagagattataaagcagtcactatgtgaatgaaaggggtagggatgtaccagagaggatatcaagggtccagaatcatcatcatagatgaaggggactggaaatggggacaaatttaaaatatttcacgggaaagacccacggaaaatagtactcagatcaaggtcgccatgattgcatttggatacaaacatgcatggctacaacgtattgacttttaaggacctcttctccaacctcgtgccactggctcaaggattgatgaaaagaaaatattccacgaatggaggtgccaaaggatacgcctgtcaatgacacgagtgccattgaacaaactgttccgccgcgctgtgcaatgcagggaccagcctgtggtgaaccgtcttgttgatcacagtcacccaaacaaggtaagtatgaagaagaaagaagaaagagaggaagaggcgggggggaggcatccttatataccttttccctggggcggtggcagattcatacagggcggtggattcatacatggcggtggcagggggcctaatcataagtaagacggcgctaaaccctgaaggcaaaactaatcagaacaggcagttcatctgcgggttacaaaataaatatacgaaaaaaagcaaggtaagaccatgaacagacatcttctccaagcgcccggacaagccgaacagttgatgaagaggattcgcgtcaatcgggggtagtgtaagcccgatgacactgtgcaacgaggcatgcgcaagcacagaggccaagtcgcgaggtccaaacattagaataatcatgatgttctgcaatgcagaactttcagcgattaaactgaaaagaacagatactacacttgatctaagccagaggcaaagagagctgaagaagaaagaagagaagacgaagttctgggggcagggccactttcttatagttatcctaagggcggtcggcttctgccactattcacaaatgagacaaacaacgaataggcccgcttaactatatatgtaaatggtaacgtgatgataaggaacggcgtctcttatttccggctgacttgtttggaactgtcattcattttttggagggagaccataatgtttgtttgtttctacaacatgggacctcgatcgtattttggacattacagacaccgccttattaatttagtaccgcttttgccaccgctttagtttcaaactccggtgaaccattaacaaacttaagtcactttgccatatcaaatgcttcattgtctacttcattataaaggggttgagctttataggaatcaggtggaatataccttcttttgatcgaaatgtaagttcttatactatgcaaagtagaagtgggcagaatatatgggagaaaaaataaagagtggcagaaatgtggcataattttaagtggcaccagatcaggaaggcggtacttagccttcaggcaggggccgtatcagttcctcgctcccttgcttcaactttaccagcttcagcaatgcagctgtatcttattcgccatgcggaaacagtacataatgttgcaaaagtcctgtaggaattgatatttctcaattggcattcccagttgacttgcactgacttcttgtgatagggcgggcaccactgattcggcactgaccaaccatggagtggctcagatcaattgccttgctcagcatttcgtctccaattcaactaaattcacgacggtgttctcttctgatttgagccgagcacgaatcacagccgagggggtctgtcatgcacaggttccatcctccggtgaaacacctttgcaaccgatagttactcaaaatttaagagagaaagattacggatcgatggaaggccgcttctggaacacttctcctccatcgccaaggcctcgagactgggctatccctgagtcaaaagagtcgatgagaaagagggctgaaagctttttcaacgaacacctgctcccactactgatgcgtgatccaaacggccgacagaacatcgcagtggttgcccatggcattatcctccaagagctatgggcatattgtattgagatcttcaatccaacagatacacagattgctcctcgaattcatgacaccaacatgactacgcctcatcggaaacctacctggtcaaacaccggctacatgactgtactgattaccccagacgcgacacaaaagactatactgcatactttcatgccgggcttcgcatttgttgttctgagtattgacgagaagaaacatctttccaatctccgtcgcactaggggtggcgttggaaccgccgcgcatgacgtgaaacaaaggaagattgaccaattttttcgataatcgactttcaacagagaaactgtggcgatgtacaagttctaccatcttcacaatgacccaaatatttagtccgtgtgaaacacctcatccaagggcttccaccaccctggaccctccgcactactcacggctccgggaatgggactctcctaatcgtgggttattagcttctgcatctctccatttgtattgaatcctcaatatacctgcatcccatcggtcatagcccaccactctctcatcttcggcaatgaccgcatgttctccatatcagcttcgatatctgttccgacgtacttgaaagtcgcaaatagagtccgatcgttgtcgaagtagattgagtctgtagaaaatataccatgttagccagtttgaacatccaatatgatcgtacatatttttggcattgaacctacagtctacaatgttgcattccttgatcttttgaaggatctcaggccaaacattggcatggcactccttgtatgctgcaacagctaggggcttgaggtggacgatttgggcgaagcgacggggttgaggttgaggcatgattgttcgatatagattaaatatttgaaattaaggcgaattgcaagagacgaccaactgccttttatgccccgctctagcttcaacccgcactcggagtgcgttaacccgagagcttggcatatatccacatgcatggaggcggcttgaattaatatggtcacgagacatcattagaatgtagatatatggatactactccgtactagtgatagcccatctacatggatgtacttgtaatactagtggtaggttgtactttccccttgtatctaaccccccctggacaccccccccnnnnnnnnnnnnnnnnnnnnnnnnnnnnnnnnnnnnnnnnnnnnnnnnnnnnnnnnnnnnnnnnnnnnnnnnnnnnnnnnnnnnnnnnnnnnnnnnnnnnnnnnnnnnnnnnnnnnnnnnnnnnnnnnnnnnnnnnnnnnnnnnnnnnnnnnnnnnnnnnnnnnnnnnnnnnnnnnnnnnnnnnnnnnnnnnnnnnnnnnnnnnnnnnnnnnnnnnnnnnnnnnnnnnnnnnnnnnnnnnnnnnnnnnnnnnnnnnnnnnnnnnnnnnnnnnnnnnnnnnnnnnnnnnnnnnnnnncccccacctccctaatctgatcactgtgtcctattcaaactgatctcgctggtctcttttctgactctttctaatttcctgattaccttggtctcagcctgcgacttaccacgatctatccgaagaaaacactgaaacaatgacatcaacaattcccgaacttcctattttcaatctcggcccgtccacactactggatattgcaacggacttggtcaaccgggttcaacaagctgcgaatgacctggtcaaccatgttttgccgcaaaacgtgacatttgagaatactcttcacccactgacaaatattgacaacgagatcaaagggaaagctcaatacctcgcccttttccaggcagtttccccttcgtcagaaatgcggacgacatcctcaacagctgtgaatatggtggataaagcatattggggtgtcttccagataccgtctctttttgctttggtcaacgttgtttataagcacgaggaggatagccacgccgaggaaaatgcaaagagtgaatatcgaaaacttcaatgagcagtgatgccggcctccaataccgaaaaatgatactggcacctggtggaagtcaaaatgagatgatggcactcaaggcattcttggggaggtcgcccacgcttgacgcatatcttcgagatcttggtgctcgttgatagagcaagccgtgtgattatgagtgaatagaacaagtctcactgactctaccaaagcctcaaataatactgattgggcacacgtcgtactctgcttcggtctggttgtcggtgtggctcttcggcaaggcaggattgaggcaccaacggccataactggccagccaaggagtgtaccttgtatacataggattctggacaagacatattgtagtaagccccatgcgcaggtgcctgaatcagtagacgaagtgcattattgattattgatgtaatcaggctttgactgtcttcgtgcagattgacaggcatcccctttgtggctttcaggtctttgtcgctgtgtttccatgaagctatatagaaaaaatctcggaccggctcgcttccgccaaatacagtttagccagtatccacattgggaatgcggaaggcagatcagtctccactctgtgtctcttggcgttatcagcatctcaccaattgttcgcgggtcggatatttgggtcgtctgcatttttatacttccccatttgccacactacgacccatggccgacaagacaaatcccaaggggacagccccttcgagcgaccctcctcccggccacgagaacacctccactaagtctcaaccaggctcagtgccccctgtgattaggcaccagccagggcgctaggcgggcatgactcaatttacctctccagcaaggccaacgcctagccaaactgccagtccaacttctagtagagctactagagcttcgccccttacaactgaagatgatctcaacctactatgcattgccgttgactataaagatcggtttactaccatgaagggtaatgccgttctttatgaggcgaatgcagaagtatggagagcccatgccgggcagaatatcagtcaccaaacggttcataagcacatcactgacaggctaaaagagcattccgccatacttgctataccggaacctgaccgcgctaaactgaacgctaccgaagctgctatgtttgactacggcaatgagatttacgaaatgctacaagagaatgcagtggcagagcagcgacgaagagatcgcagggctcgtgcggatactaaggctcaggcaagtaccgactctgtgcgggatgacacagccgatgaattagtgcaaccagcaagggaaaaaaggcccagaaatccggtggactctgagaggaagaaatgcagcaattaacctgtctacgtatagcataccttactaattataatatagaaagtgagcggccaacagcccggccacgaaccctacctccctcgccattgccttcctcgccaccactgcaaacagaaatcgctctatttcttagtatgatgaacagtcgagcagccctagaagcttcaaccggggctaaaaaggaagatatcactcggctagaaactcgaatggatagcatggctgttactatggagggatgatgagtttgcttagaaccattacgcacaggctgccaaagtaattaaacttcattttcatacaaattaatttacagaacgaatctcaactgtacatacacttaaagtatcgaaagtattagtatattgtctctttcatgatagggtctgactcttaggaataggacgaatccaagaaacggccaaattggttgccagagatatcacaccgatgatccatagggatcgcccgtagtttgacccattgtatctgaagataatagcaaagatgatacccccaagattaccgagaccaccaacaattccagaaacaatacctagtgacaagatgttagctcgatatttaagaagtaataacggaatcacgtaccattagcaaaaggatacacatgagggacaagagcaaagttagccccattagatgcctcaatgaagaaagccaggccggcgacaagaccgaacatggtcgcttccgtggacgggttcgacaacccgatcgcaagctggaaagctcccatgccgatccccaaaaaggcgatcaaaatctttttagaccaggccgtgcctgtatataggtaaaccaagtctccaaatagaccacccgcaggccgacagacgacgttgagcaggccgaacatggcagcccactgtcccgatttcgtttggctcatgtgtgggaattgttctgtgtagtaagatcccaccatcgagttgattgctagctctgagccgaacgagcaggcatagggaattgccagggccatagtggatagactcatggctacgttcagggcttctcgccgagtcggggagacgactgtctcttgtcggaagatgtcgatctggcccgttgctggtgtatcgtctatgacatgtggtgattgggtacctttcttttcgatgtcgattgtggcggcattgtggggtgtcatcgttccgctcgaagaagtgcaggagttgatgtcgacgatgttggcgttgggggccgaggtagtgccatttgaatctttcgcccagaggtttctctcagaccactttcctgtcggtgtatcttcgcagaggactaacatgcatagggcgacagcggtgatgatgatgaatggaatgacgtaggcgatacgccatgctttgtgagaagggatgccgcgggattggacgagggagtcgtaaatggcgggcattacaaagcttcattgctttcgttagtggattaataggagaaggggaaaaggtagacacctactatgtgattcctccgcctgcattgccccagcctccagagagagaattggcagcaccaacaatgcttttgtcgaagaaaccagtgcaccagacctggcatgggacgaaagtgcctcccagaattccaatgaaaaatcgtagcgctattaggcccttggggccagtgacgagaccggccatagcagtagggatggctccgcatagaagtagtcctacgaagaccaatcgtgggccataacgatcacaaagtggccctgcaacaaatcggacgagtagactgtagcggtcagagaggtgttttcgattgattccatattgtggtacctacgttgccaggagtgccacaatatttgagttggcaacatcttcttgtgtcattttcaaatcctttttgatagtcacattcaactgggaagccggagattagagactgcgttcttttggtatataaaacctgatgggactttttatcgtgaactcaccagtggtggaaaggcataccatgataggaatgccaccatgaagccaagccatgagaagaagaacacccgtccatatttatcgaaaggattcaatactggaatagatttcgctttgtgggtacttgggttgatttccggtgatacatagaggcgtttaaaaaaccctggtgccattttggttggctctttgtgtagtcgagcgatgagatgaaagtaggctcggattacttgatataaccttgtggattaaatggaagtaagagctctttcggagatttaggagaaaattcaagaatagatagaccttcgtatctatatagacgtttagtgtgctttgctagctgaagtatatatcgcaactgcatcttgccatgacacatgcaagcacaatcagtctgatattctgcctgtcaggttgtccaatcaccgcaaatagccacgtgctgtcaatcaaaaagagttagtcaaggcaccgagtactccgtatatctcaggtcgctgatttgatacagcgtaaggacaaggttgcagcaagatcatcagaccctggaatcaatgcggaacttaatttttgccccagacttcatccctgaaacttccgcagtatcctgccatgatatgctggtagagataaggtacgaagtagaatgacctatagcagtgtaggatgtatactgtaccagattccatgattggagggaaagcctgatagtgtgattcagtccagttcatataactccgcggaccttcaattgacttaaagcttacatcataacgttctaccgaacctaggaacgggtcttttgctccacgttgcccagaaatccatatcgttgataaacgcgggcctcctcattggatgccaagccaaccgcgataggaactgaagagttcagcccgggtctttgtattggacgaccttggcgatttgagctccgcggaaatacttaattctgactgtgactccagttaatggattcagggttctgggttctggggtgaaccctaccgaagatctggtacaatccaccggtctaaaattagggcttcttttagcaaacgctttctaacaatcggcctgagtatctcttttccctgtaacttttactatgagcaaaattcaatatctcctatttacttgatacaccgagataagaggatttagcgttgactgtagaaataataggccgtggcagtttgtacattcgctagataattagtcaatagtactcagtataccagatataggagatcttcatgtgttgtcaaaagtcatccagcctcatcactgggtaactcttcataggtggtgtataaatacctgtaaccactgttggttgatcagagccaggctttaaaccatctgatgaagagttaaaggaattaataagaacctggagatgagagtcgtctaatcaattccatgtctcagatatgtatcgaggtcaccgtctttatatattggaatgacctagcatctgaagatgcctcttatgtggtctaaggcggcgatatatactggcttctttggcaatatttacgtagcatgtgatcttccatcggtccaggaaaagaagtagtgaaaacaatttatgctaagcgcatacattctcaagtgtactcataaggccatttttcatctcgatgttcccatatgcaacatattccatcgcataatctgcaactaccaatcaatggacttggctggttgcaccgctgatacaccagtcaaaaagccatcggtgaccttcttccccttcatacccttgaacttcttatcaaccttgtggaaaggatcctccgtctcactcttacgcactttccacttctccgtgcccaaaatcgaatccaactcctcaatcggcggaagtttgacatatacccagccatcgtccctctcctcaacagggaacgtagcaatattcatactctcatcatttgagcaacgacccgcctgttcaccgttgagctcgaagttgcgcttgtgatacggacacgacacccaatatttcccagcatcatcatcgccaacgaggccatcagaaagaacaaaagctcgtttgtgcgggcacatctgctgcgtcgcatagaacttgcccttgatcttgaagatagcaagctgcgtgtcaccgcgcttgacattcgccgatgacacctgaggtggctcgtcggagaaatgatctgctcggacaactggctgccaggagacacttgaccacttgtggcctttgaaatcctctcgctcggcagagtccttgggccagtatgtgggtcgctgctgggatcgttcttggataacttctaccgtctcgaccgtttcgtctgtgtttgcaaattgttggaagacttttcggcgcttggggtctttgacggtctcggtccactcgcagaagtaagtatcgactagttcgcgcatttgcttttccatgtcggcgcagatcccaagtttatcatccacgatcacttctttgaggtagtggattccgcccggaagattttcgatccatcgtgctgttcgctggagcttgtcggcggtgcggatatagaagatcaggtagcggtcgattatgggcatcaccatctccgctggcacatctgtaacaaggagttcggcgtgtctaggttttgcacctccgttgcctccaacaaatatgttgaacccattttcggtggcgatgagcccgaagctggcaactattagtcctgagtgttttcaccagcgtaggatttgcactcactctttgttttgggcctcggcacactctcgtacgcagccagatacagctcccttgaatttatgaggcgcacgaatgctcttgtatcgctcttccagtcgaattgccatgccgacactgtcgccaacaccgaagcgacaccatgtggttccaacgcaactctgaacgttcactgtcagttggtactctcttgaagataattgctccacgtactttgattgctcgaagagcctttgcatatgcgtgtccgctctccatacccgcatccacaagttccgtccagatatttagaagatcctgcttcttcgcaccgaacatgtcgatgcgctgggcaccggtgattttgcaatacagaccgtatttcttggctacagatccgatagcaatgagtttatcggccgtgatttcaccacctggaattcggggcaccacagagaatgtgccgtttctttggatgttggccagaaacttgtcgtttgtatcttgcaagtcattgatacccttgtccatgacgtgcggattgaacaaactagacagaatggaaccaattgcgggcttgcaaagttcgcaaccaagagattctgggttctttccgacggctttcatgatatcgacaaaggttttcagttgcttgatggccacgatgttgtatagatcggctcgggagtagggaatatgtgaacacactgaaaatgttaatgatgacaggagctagcactggagaaagttgatattacttacggtggtttgatacctcttgtcccatttcaagcattgtcttgttgaagattgactgaacaagaggcatgcaacctccacagcctgttcctgctttcgtgcatgacttgacttgtgcaatggttgtgcatgtgccattcttcacattatcggccacatctcccttggtgacattgtggcatgaacagatctgagtgctgtcatcactgcagagatgagttagaatttctccccaatagcagaactaacgatactcacaggtcatctgcattttcctccccgccattttgggcaccaaggatgaattgacttggaggaacctcgagttctttctgaagcttaaccatctgattcaacttcagatagtctttggtatctccaatcatcatgccaccaagcaagaatttgccgtccatagtaaacaagtacttcttgtacactccactaaaggggtccttatatgtcaaagccttcacaggaggctcctctagtgaagtatcccctcccagaccagggccagtggaaggtcgacgaccgggaagaaatttcggcccatctctgtcagcaaagaagtcaccgaaactagcgacatcaactccgagaagcttcaactttgtgctgaggtccggccgcgtgaaacccctaggctgtttatctgggttggtcagattgaaggcgagcacatcggccatctcaatgccgggagcaatgattccgaatgtctggttctcccagcttgcgcattctccgacagcgtagatatctgggattgaagtttgcagactatgcaagttagttggagactgaccaaaagactgttaatggacgaaccattcatcgatcacaaatcctccacgctcaccacactggatcccaatgttacgacccagctcatctcgaggttgaactccaatctaagtctgaatcagcacatccatcatcagacgaaagcaaacaaggacacataccgcaaagcaaatacagcaacaatcaatgctctcaccatcctcgaaagtaatccctgtcacattatttccctcgtcggtatgaacaatcttgacccgtttctgatggagaacatcaagtcccaactcctggatcttgcgagtgaccaaggaccctgcatctccgtctagctgtcgcgccaggacccatttattccgatcaatcaatttgacatttccgaaatcctccaggtctgtcatcgccttcgcagcttccaggcctagtagtccgcccccgactgtaacagccgtttggcctttatgctgagcagcaaagtcgatgaggcgttccaagtctgagatagttcgatatacgaagacgcctttggcatcgtaaccaggtgtgtgtgttggaagagttgcatcggagcctgttgcgaggacgaggatgtcataggctatagtgtcaccggtggaggtttggacagttttctccttgggattgattgctgttactcgtgtgttgatgtggtgatcgaaggatcgttctttgaacgagtcatactaataaggtgtttttttattaggtcttatgttcttcgctctcgaataggtgaaggcttacccattccgttggattgaggtataagtcctcaatcttgcgatgctcgaaaaacgacgagagtccgacgcggttgtatgctacatgggactcttcgccgatgacaacgatgtcgtattttcgctccgtatcctgtttaataatcttctcgctagtttttgttagaaaatttctcatgtccgtcgttgaattttccttacatgagtgagatagccaccattcccagcccaactactacgattttctggcgctggacatgagttgcaggactagggctgccatcgactggctccccatatcgtagtccatccagcacaggcatggttgagactggacaaggtgagatgagtacggtacaagcactgacgactacggaacacggcaatcattctaattttaagaaaagtaaattgtcccactgggtgtgtcactacaatgagattcgtacgaatgaacaaatcaaggctaatctggtcatggaatcggaagaatcaggaaagttctctcaggagattagttggttcgatctccgcggagatgatgtttttatgttggctgtgattggctgttagggtttcgggtttatctgaacgtctaaagataagaatgaacaataagatacatacttgactagacttgacgaaactctgatctcacggcatgtggagggctgtggatcagaagggggttcagggtccgcggagatctgaaaagtgctatactggcgatgatattggggcggagccgaggatcttaggcctagatgctgctattccacagcaaaatgtgaatatttggacgtttaggactatttggattcattctactcggtttttacaatatttttgatcttattttagagcaatttcgagggtctcttataccaacaatttgataacagcctcgcgccagcaccatcatggccagcataaccacacagacgataacagagtcccaaacgatctctcaaataacaatcgagaacatcataccaagtccaggggagctagacatcccacttccaccaccgtcgaagaaccttgtcgacatcttggatgtggataaaggcacaccggatagccatgtacctcgcgatccacgattgattcggttaacgggagttcatccattcaatgtggagccaccattgacggctttatacaaagaaggtatctattcccatatgtcatagcgaagctcacaagctaagcggataccgaaggctttctcacacccccggaactgttctatgttcggaaccacgggccagtgccccaggtccgcgatgaggatatcccagattgggagattagtatagaagggtgagtgcgatcgaaattatgctcgcaggcttcgaacgggaactgattgatgagctaggttggttgagaagccattagtcctgagcttctgcgaagtgcttcagaagtacgaccagattaccgccccgatcacactcgtatgtgcaggcaacagacgcaaagaacagaacacagtccggaagtcgaagggcttctcatggggtgcggctggtttatcgacagcgctattcacagggcctatgatggcggatattctacgcagtgcgaagccacttcgaggagcgaagtatgtctgtatggagggcgctgataagctggtgagacttcctatatcaagatttgagggtttcaggaaccatcctcgagttaagactgacacattccatagccgaatggattttacggaacttcggtcaaattgaactgggccatggacccaaaccgaggaattatgctggctcataaaatgaatggcgaagaccttcggccggatcatggccgccccttgagggcagtggtgcctggccaaatcggaggtcggagcgtgaaatggctgaagaagttgattctgactgataccccaagcgataactggtatcatatcaatgataaccgagtactcccgtaagtcttacgctaaacgatcgcgcagtgagtcatgctaacagttgtcaggacaatggtgacgccggaaatgtcctcccaggatcgcaagtggtggaccgatgagcgatatgctatttatgaactcaacgtcaattcggtggctgtgtatccacaacacgaggaagaaatcgatatatccacagctgggcccacgtatacagtcaaaggatatgcatacgccgggggtggccggaggataataaaagtggagatttctctagacaggggcaaatgtaattgcaccccggaccaaaggatggaacgtggctaacatctctggtcctttagcatggcgcctcaccgagatcgagtatgcagaagacaaataccgtgattttgacggcgacctgttcggtggcaaggtagacatgtggtggagggaagcatctttctgctggtctttctggtcgttggaagtcccagtggcagacctagagactagcgatgcaatcctagtccgtgcagtggatgaggcattaagcgctatgccgcgtgacatgtactggtctgtcttgggcatgatgaataacccctggttcagagtggcaatcacgaaacaaggaagtacgctgaaatttgaacatcccacacatccagccaaagctggcggatggatggaaagagtcaagaagactggtggtgacctgcttaatggtaactggggcgaaagggttgaaggcgaggagctcgtcgaaccggagcctatgcaagaaataaatatgaagaaagacggcgtgaacagacaaatcgacctgcaagagttgaaagctaatagcagcagcgaaaagccatggtttgttgtaaatggcgaagtgtatgatggcacaggcttcctcgaaggccaccccggaggagcgatcagtattacatcttctgctggtttggatgtatcagaagacttccttgcaatccgtgagtcgagattaaaataccttcagactattgcaccgctaatttgctcttagacagtgaaactgctaaggcaatgatgccggattaccatattggcacattagacaaagcatctcttgaagcgatgaagagcgattcggctgcggattccgatgagccacgcgcagtgttccttcagtctcgagcatggacaaaagccactctcacagagaagagagatgtatcctgggatacacgggtattcgtgttcgacctggaacatgagaagcagacgctcggcctaccaatcggccagcatctgatgattaaagtccaggatccatccaataacgaagcagtcataagatcctatacgccaatgtcagacacaaacctgataggcaagatggagttacttgtgaaggtctacttcccaacggaaagcattccaggaggaaaaatgaccatggctctcgacaagcttcccctgagctctgagatcgagtgcaagggtccaacgggccggtttgaatacctcggcaacggccgggtttcgatcagtggtaaagaacgccagctccgctcgtttaagatgatctgtggaggaacgggaatcacaccagtctttcaggttctgcgggctgttatgcaagacacgcaagatcccacgacatgtgttgtgctagacggcaacaggcaggaagaagatatattgtgtcgttcggaccttgatgcttacgtggagactgactgtcggaaatgcactgtcgtgcatacattgactcaagggtcggataggtggactggtcgtcggggccgtatttctgaggaactgctcgcagagtatgcggctccagaagagcagagtatggttctggtctgtgggccagggcctatggagaagtctgctcgcggaattcttcttgcccaaggttgggccgagtcggatcttcacttcttctaggtttgatgtgtctattttgcatatcagggcatgtaacattggttgtgtttgagttgtacaataaaaatggatatgaggcaacaacggaagccggaagggtatagagacactgggctttcatttgcatagacacgaaatgaattttgaaggaaagtcgtcaatcatgagttgtaacatgtccaagcagtacagataaatcgggtgataaaagtaccaactaagctccagtaggttgctctttacacattccgaatgtggacgaattgcttccttcaatcaataatagttcttgacgtctaatctcactcgtagatgctcaaaaacgctggttgggtctgtccgcgaagagaagaattcccctgatttagccattgatttcgaagtggcttttccggactccatgctgcgaaggtaattgacaaaggcggaggtctgttttctgaaagactgatacaggtggagaacagccccttcgctttcgttgcgcatcccaattccatctgcccttgagagaaggccgaaactgagaatagtgccgaaaattgactcgagcagtttggcagcctgcgcatggcgcttactgaggaataatgcgaacaacatctggtcaaggatatcttcgtgatagtcgcgaagtcgtggtaccgagtgagccgcttcaatcgtaccgtcgatgtcaccgcggttgaggcagtgctcgattttggtaagtgtgtcttgaaagcgctgccagatggacccaattccaatatggaagcagtaatcacttaccgctagcacaaagtgctgggcatccattctgaacttctggtacacattgtgtgtgtctcctgatagagatcctcgggcagtagaatcccggataagtcgtttaacggcagaagccatgcggattaaccggagcaaatgcttgaacagacaatcatacttattcaaagagcgagcagtaatgagagattcaagaacttctggtggtgtgtactgcagacgaaggaagtccaaagcctctattgcattcggatttttacatccttcaatttcttcgtctgtcaattctcgaattccgaagctcaggccaccaggcaattccttgtccttctgggcgtgcgttttttcgtcatcttctgtatttgtgccaccaaagtaacaatctccgagcagaccaattaagacgagtcgcaactctgaactagctggcggccatgtgtcacgactgccgaggcgtagaccggtgtcgacaccactgcgcacttttccagcccttcgctctccactttccatttccgggtcgaacagtgaattagaaagacgagcgacaaacgagccctctcccagcaactggaaacgccattgcatgttcagatgatggcgaattcgatgctctttgaagagaaggtgcaggcaagagtagtcgatgagaagtgcctgtgacgaaagaatgggagcaagggataaatggaggccatatgtcaactcaggaccaagatagcttctttcattggtatcttcggcttcaaatccccgggctttatcgagcagtcgcttgaggccatctttcgaaagagccttgtaatccgtcactggtcctgaatcatttttttcatcgtcgatatcgaagagttgaaaggctgtcgttgtaacctctgtgttggcagtttgatcgacggtctgggtgaccacatttgatgatgaatcctgcaagcctgcatccccctgatgatatttcttgatctcagcgcggagtcttgactcgtattcctgggcttttgtttgaatttgctcaatgccagcccaggtggtcgcacaatgcagatggagaccaccgattcgtgagagaacatcgcgccgtgcgataggatgacgaggatgggatcgtttcaatagttgaagacttcgcccacactcaaagatagaacgggcttggtcggccgggatgaaagacggcatgtgctccgcttggtagatatagtcaattcgcgctggcccagtcttgaacttgccacggtcataagtttccagtcggacgaagcttttgtcgtttgtcatatattctttgagagctgcgtcttcggatctaagcccaatccaagtctcgatgaatccgaaccatggctgagtcactcgaatcacaatctcatgcacaaggttctcgatccagccaaacttctgggcaaaaaaagctgcacgttccacgacaattgatatgacttgtgcgtccgagacagccctttgtgcagcgccaacaatagctgccaggacgcctaccacgtccccgcagcggtgaaatagtgcctttatttgtagaagtgaagcaatattttttgaatgatcggagatctgttgttccaggttaaagattattatctcaaccgtgctagttaatgtgaaaaacgtagaaagttctctgtagttggctggcgggtcttgggcaaataaccgcaggcgctgcatgttggtaccgcattgtaccacattttcgatcacattttccaaggccatcaggctaataccagagactcggatattatccttcaaacatctttcaaattggttggttcgttgatcgtagcgaaagaatgcagagctccagccaagcccaagacgaagtagtgatcgaatgaacacatctgttcgaacaattcgagtaggcgcaccgtctttctttaccatgtttcgttgtaccaaggctgcatcgaagccctgtgctccagattcgctaaaataggctgacacaggctcttggaaagacttatgttgatacctctcccacgatttctgcgggggtatttgaccaggttcttcctgaagtaaatccaaagaccagatatcgttgttgtcgcctgatatgtctcttaaagaatcacatgttgtgtcagactcgctgtctatggagggattgatgctcgagtcggtaactgattctggtttctccaagccggttggaaagagatccagcttccatacagggtcgatcttgtcttcaggctgtgggtatatctcaaaacaagatgtagtatcacctataaataaatgagtgttattgaaggccctaaagtatctgcggttgagacttaccacttagagtagtgttccatggtaacgatcccaatggctgcagagcttctatgctgaatttggagagtctccagaggctttcactcgagaaaggatccagctcatgatcatagtccatagtgagaccatgctcagatgagcaagatgtttgacgcgtgaaagtcctaggtcccgcgacggagatggttatcgccgtgcacagaccgataacagaaagtgcctgctcgaagctcaataccacctatcccactacaattcagtcattcctacttcctgtgatcctcggatattgcatcgaagctacaatgcctccaaaaaagaagaccaagcgcgcgcactcgcctacaccgcaagaagataccgtggcggagtcaagcgcaaacaccccgtcaagcgacagcgccggcaagtcagacacggactacgacctcatcacagatccctggacagatgagcaagaaactgctctactcaaagcgatcataaaatggaagccagtcggtgagtttaattctcacctctgttgagtcgacagcgcagctaacggaccgggcccataggcatacacaagcattttcgcatgctcgcaatctcggattacttaaagagccaaggatacgcgccctctacggcggaacatatgcggattccagggatctggaagaagctaggctcattatacaatttggaagctcttgacgaacgggtaagcggcgaatgatggcttgttcgcgctggttcattttgctgattagagatatctttacaggaagattcggcgatcaccgatgtgaacgaagacgataaagggtcgagtgagatgtattgtgcatttgagctcccgtatgacgagtacggcgacatgatgtttgacaggcggcttgcgatggaagagtccctgtctcctgtcaccagtcgcgccagtcgtgcaggcggatcgcgacgaggaagcacagtcgcagatacagatggtaaggagtgacattatctacagcatgggctacaacccataaactgacttcttgcccggcacagaaccacgatcttctcctgtcccgtctcgaaaccgcaaaccacgtccctccacgcgtggaacgcgctcaactcggctgcaggtggaaataggcccagggagtcaaggcaaaatatcagatgaagggggtgattcggcagaagacactggtgcgaatgatgaggatgacgaggaaggcgaggatgggaatagcgaagaagatgagggtgagggcgaaaaaggtggttcacggagtacccgagcgcagacatctcgttccaaagccaaagataataggccttcgactggcactgcgacacgcaggactgcccgacggcgttaacatggccgagttttcgatgtgggttttgtcctttgataccaatggtgtttggatggcgttttcttttgctttatagatgtgtgtggccaagtaggcatcttgtaccctattgctatagtagcagaaccgatcaatctacgatatagatctaccaagatattatcaaaggaaattcgaggtttttcgggaatcaggcctccaggtaaaccaaaactcggtatatttcgatcgctataggtctaatgttgttcgaacggtacaaagggaatagatcagtgtgtcatagtacaaggagtgtccgcagcgcgtggtttacaggcgcttgatgatagccccagcatactcctgggtcttggccttacctccaaggtcaccggtgagggtctaaaggtcatggggtcagtaatgcgcggtatctgtaggaataaatgcaaaaactcaccttgccctcggcgagagtgtcgaagatagccttctggatgcggttagcgtggtcggagagacccatgtgctgcagcatcatgacactgctcagaagcatagcagtggggttggcgaggcccttgccggcaatatcgggggcggagccgtggacggcctcgaagatggagcactcgtcaccaatgttaccggagggggtgagaccgagaccaccgatcagaccggcgcacatgtcggacaaaatgtcaccgtacaggttgggcataacgaggaccttgtcgttgtagggggtagggtcagtgacgatacgcaggcatgtgttgtccagcagctcagcgtcgaactcgatgtcggggaattccttagcgatctcacgagcggtgttgaggaacagaccgtcggacatcttcatgatggtggccttgtggacaacgcggaccttcttcttgttgatggactgcgcgtactggaaggcaaaacggaggacacgctcggaagcctcgcgggtgatgagcttgatgctctgcacgacaccgtcgacgacaacgtgctcaataccggagtattcaccctcggtgttctcacggatgagaacggtgtcgacgttgtcgtatggggtcttgtagccagcaatggagcggcaaggacgcagattggcgaacaggttgaaagtacggcggagagtcaagttcagagagatgtgacccttgccaacgggggtctagaaaggcaaaggttagtatcataatccagatgcaagatatatatgggaaattggaagctagaacatacagcgagaggacccttgagggcgacgtagttacggcgcacactagcgacggcttcgtcgggaatggcggtcttgccatccttcaagatgggggtgacatcaacggattcccacttgatgggggcctgttattgacttagtatttcgatcacgttagagagttaacatgctcataccttggcagcctcgaagatgtccttaatggactgagagatctcaggaccaataccgtcaccctcaatcagagtaacaatgtatttgccctattagaaatagcagatcaattagcattgccgttgagaatatacgtggtgatgttctcgaattatggtcgctgtgcgctgcgcggctggcaccggcatagatggataaccgggctcggttggaaggaacatacatcaggacctttctgacccttaaacttggcaacagcctcctgtgcagggctggcgtagaaccgaatctattcaaaagctcgagagttagtcaattgagctctgaatagttagctactgagtgtcctgaggggttggtacctgcgcgataggagcagcaaatcggggtgtcacgcgggacgagcgcatgcactggcgagcgacagagaagtttctggtggcaatcatcttgatatattccctttagtttcttgggtagaagttaaagaggtggtgagaaagaatgaaggaaggagaagttgggaaggaatgaaatctctcggcgccgtaccgatccgaccggctctcagaccgcattggttgtttcatttcccctccggcccgagtccactcttttacctggtgctggtgtccactcttgacgaccagctatagggtctcagctgttgattagggttctgctatcagaggatatcagatcttggtcacctgcagaaaggcatagcccctggttctttttcgtatttcaattagtcctgactcctgcgcttcacccaccgggcaatcatggctgacctcgacgtcgcaagccactacaacctaccctccgagttccccgaggaatggccggcatctttagatgcagacgatgagccagaagaacagccagttcagcgagcagactctcgtccacgcaagtcccgatacatagctcttgaacgcagtaccagtgattggagaagcaactttggttcacgaagagggaaggaggggagagacaatgcacgggaagacgagcccgatcccttgggtacaagcgacagcgttctccggattcttaagcagcgaggagtgccattggaggaagaaggcaaatcacggttcctgctgtcatcgacatcattctcgccagcactattcctatcacaggctcatcactcggcctccattgaatcccttataagcggcctggataacctatcgcattccatcgaccagaagtcggcatcgctgaaggtactggtggaagccaactttgagcgtttcgtccgtgccaaggcaactatcgatagcgtctacaccgagatgagaaaccagggcgttgataaagaaccaagcctaagtcctcgcaggtcagggcatttccggagctattcaggtcagcaatggagcacatctctcgcccccgtggttgttgctaagaagaccgctcttgtcaaggagagtgagttcggcatgaagggtattagaggtccgctagttgaggcctctgtcaaggccgaagaggtttggggaccggctcttgggggtcgggaacgagagaaggttctgaagtcggtggtggagactatggagaagcaccgcgatgtctatgaaattggaagccacttggccaagtccatcaaacaacgtgattatgatgctgtctttgagcagtacacgaaagcaaggacactcgccaaccaggctaagaatatcgcggagcaggcgtccagttcccgtcggcaactaaacgactccgagacacataccattctggctatgggccggatggtgatggacgttgaccaacaaatccatggttttaagcgtgatctctggagacgtcttgccgatgcccccactacatcaactacaagcaccgcctcagggcctgtggaagaacacatggaattaatcggggccctgttggaattgggtgtcgaggaaaaccctatctggaaatggctccagagtcgttacgaattcctgaagacaaagatcaccggattcagtgatcgatgcaaggtcgaaatcgaaattttaagaagaagacttgctggtggagagagaccaacttcgcaggcgacagcatcctatctccgcctggcacctcgtgatggtgcggtagaattaccagcgatcctagatacggatcaagtcattgagctgtgggaatgcatacaaacgttcctaactcgacttctgtcctcgcaaagtggcttgctgggcgaggtcttggatttctgggaagtcgcacaatcattcattgatggcaatcgacaacggcttttgcctgtcggttttgaaggggagagtcgcaaacaccaccatctttccaacgacaatattaagcagttagagcagggtattgacgtgttggtcaatattattcgagaaaacgtcgtgacccttttcacggaacccccaaccgaagatatctccgtactcttctcgccagttccagcaagtccatcaactccagagtcgaggggtattactccgacagagtcccgcttcaagttggacccgaggaacctaccatatcctccgccaaagcttggagagcactgggagagttttgcattctggccaccattttctaattccctgagtggagtgcactatttgagtaaattcctcatcattgtgggcaccgctgcgagcgaaatggcagacctaaggccgattggcggctctggaaaaacatatgacctcctcaagacccttgtcagtattgcccgggaacgatgtgcacgtgtggcgtgtgctgcctggagcaaagatgcggaggtctgcaaaatgctggaagactggacacgcgattcagagaagcgtgatttgactaagatgcctgggttctttgtggcttttgagagtgctatcctggtgggcatgcaaaagattctttacatctcggaagctatggcaaagccgggttccgtggatgttgtcactcagccgcctgcgaaattgcttcaaatggtccgctctcagttcgtatcgagtgtttacaaatcattaagcggcttggtcgaaaacgcagagcgcctgacaacagtagatgaagaaaatgaatggattatttctcgaccagcaatgacaagccaagcgactgacgctgcattgtcggttctctcggctgattcggtcgattcttggaatcgcgtaagtatcggtccaatctgatgtgatacctgcataactgaccacagaacagaatgttcgaatccttctcacactctcaaatctgaaggctctgcaggccgactatgtcccacagcttatctcgaactttgagtcatccttctcggtcaagctgtcggaagaggccaagaccgttcgggacgtgctgagccagattgaagacaggctattccaatcatatatcaccccgactactgtcttattacacaaaacaattaccgctggcattgcatctccagattgggagccgtctgtagataggccggagcaagtccgcccatatgtctacaacgccctgctgatcatggtgctggtccatacagagatctccacaactattccgtccactgtgtcaccgggcgctagtcgcgctgcgtcaagctcaccttcctcgctcctagtcactgtgttgacacacctgctttctcaaatttcttcatcactgctggatgccttccgtgctcggccatccttctcactcccagctttgatgcaagctaccttggacaccgagttcattgcacagactcttagctcgtacataaccgacgaggcatcagatgtacaaagtcagatctacgtcgagctggattgtcgtaccacaaatgaagcccgcacaaaactgaaggccgaactaggagaaatgcgagttatcctaaaacggctcagggatcggacgaaggggcagtttgcttgcttcaaaaagccgagaagcggtggaggtgcaaatagcggagggacctccaagcctcccactgcggccgggacatactactaggtctagcaagacagtactattcaagaatcgtaatctgaataaaaacttttatttcatatccaaccgggtatcatggaaacatagtccacaccatgcatgtgtagttcgtgcctttcctctctaattctgaccaaccatccgctgcacgcgactaagcaacgcggtgctctctctgcctaatctcctcttcccaaactggtccggccgcttcgcgcgtagcagggccccacgctcgttttgtttcgcctcgcgttccttctgtcgtgcttcctcggctttcctcctcttctccgcaaactccaactcccttgtgaatgcagagggcttttgccggcgctccctttgtttgccctcgcctcgtggacgccattctggtttaggtgcaggtgctcgctccccctcgggctcgttcaacatggctatgcgatccgggtgaagttccagagttgttgcctcttcgccagcctcttccttgtccttgccagtttcgacttcgtccccctcggtggtatcgtacacggatttcctaggcgcgatggcgagttcttgggctttgatcttggcataggccttcttcactttggccttgtgaatcaagtcatttttgatcttttgggctgttttttatcgtgtggttagtctcattcaagacatggctttcgggcgtgctcactcttgcgacgatatgtgccatctgggaggtttgcaggtccaacgctaaagcccttgcgcttcttgatcgcgggctcgccctttgatactggggcagcatctccatcgtgggtgcgtttcggtgccatgctgatattcaagcaaagcaaatttgttttgtcttaacgtgtgttgagaatcgaagactttcggagaaggaaaaaaaaaatgtggcgatctccgcacggaacatcggtctcggccactagcaaggaagtatgaacttttgaacaatatacagcacctttgtcttctcggttttggggctaaaagatcgagattgtaggtaattagcattagcaatatcattagcaataccatctacaagctctacaacatgttcgacattatcagtgattctattgagctagtctacgcattatttacttttttctctctatttctccccaacatctcccatagcccaggcatcgggccttgatttccttattgagaccgaaataatacaaatatacaacattcaatatgactcctgaaggctccctatccaatcactgcaacacaacgtcactggtccatcacatgacgttcgcaggccggatctccgagatccacggcgggtgtccaccccattcaacgacacaaagcatacgacctgctcaatactttcttcgcctatcaacctgtgaggttcaaactgggcattcatactttgagacagcagcaaaagtcatgcccatggcgtgacgtattttcctctataaactgttatcttcttctcccaccagtaaaaaccaccgacagcatatacccgaatcatcctggtacaccgcatccaacttggaacccccaccacggcacagctcggctttggtttcaaaaaagtgctacgtgggtgtcttccggaaatgtcacatttagtattttatgtcttatagtctgcccttatcataccaccatgcccctatttcgagatccggatcggaggcgtcattatctatggtcgcccgaccatggcaatggtgaacaaccgaccacagggtcctcgcagctccagctaaatgatctcagtcacattgagggtgaggtagctgctccagaaatgacaaccaactctatgcattcaacggcgttgaatccgcctaagtcgtgggcgaatgatcgggaggagctcatccaccgtatcaaagaatcttcgccttggagacttcaacatatggtatgtgaatctcttcgtggatgcctagcactgttccaaatctctgctcgttgtgattccgctttctttatttgtccaacacatgcataagctaacatgcaaacagtccccggataaggacaacaaagatttatttatatctcaaacttcacgggagcagtcccaaagagcagcaagagagtatggaagccactctctcaacgaagaacgtcatgtcaatgcgacagaggaactgggatcgccggccgatatccagagacctcggtcagcgttacactccggtgatttcagggaaggtgccacagattctcatgactcacacgctccacggtctccctttactgaccggagcttggcttctccatttgctcatttgagctcctcgcccactactccttggttcggagcacaggcgttgccctccggtttacgaaagacaggtacatcgaatgaacaccttcagtccgatgttatcctggatgctcgcgctggtgcaccgtcggtgggctcattctcgtcaagttatgttctgaaagctcctaccagtcctctggtataccaagcgaataacaccgacttggacttttcgtcccgtgttgaccatgtggacgttttggaacatttagacagaaaaaaccgccgccgtactttgccaccagagaccttccgcaatctccaattctccttgccaagcaatcaaattctcaaccctaacggtccatctccacccaaacggcagcatgatgtcttcacaaatcaaacatctttgcctcgccggtcattgacttcatcgtatagtcttcaacttgcaccgacccccggggggcagatcccaccatcgcgagtaagacggccgtccttcgtctctgacatctcgtcaaaccatcacgcgccgatggtgggctcttacgaggaatcgatattacgcgggagaatgtcaatgaatccttccaagccgctagatttcacggctcagattggtgtcctaggcaaggggaattgcaaaggtcatctaaaatgtccgccacatgttacagtgccatttccggttgtcttctacagttatccgacctccgggtccggccgctcaatctcagatgacaatccaagtccctatgtgggacagattgacctggaaaattccctactaaaaggaaattccaatccgactagacgtcgcaggcgacatccaagtctgacggaacccctagaaggcattcccgccacaggtggagcaaatgatacccctgcatgtgctgaatcacgacgccaccgagaaaagaagaatcgcaggtcagaatcgcctaaatgtcccccgggggggtcttaccgcattccgcaacaaggtcaactacaaatcataatcaaaaacccgcacaaaaccgcggtaaagcttttcctagttccatacgacctcggtgatatggaaccaggcacaaagaccttcattcggcaacgcagctattcggcaggtccgattatcgatatgccgctcagtgcacggaaaaattatgggaccgatcgccctgaagcttccttgaatcccacagaagaccctcaggacaaacccacgttacgatacctcattcatctaaacatctgttgtcccgcgcgcggtcgcttttatctacattcgactattcgcgtggtatttgcaaaccgcgttccggacggcaaggagaaactacggaatgagatccaaaatcctgagcctcgatacagcccgtacaagccctcccgagagtcttccatctcgagcactgcgagcgcaaatacgcgcctgggaactgaacaagcgtctcgcagactgagtgtgggccagggagcgacccctcgtctacacccacatgtatcaagcgggttcccctcacagctagatgcgccaagacccgtggatgttacaggtggccctgaaaatgatgctccctcgcatagtgtgtctcggtacaacgagctcaccggaggcgacaagtcttacgaacgtcatgctcgtatctcgaatccgatcgtcccagaatctggcgagagccttcttgccaaaagactccgaggcctcgatgtgcacaggtcggagtccacagtagatgaacgacatccacgcaaattgggcctttatgatcgaccatctcctacccacagccaccatcctcgctgaacgaacccagcgctatatcctccaagaaatttgaccccgccattccgtataacaataacaccatctatctcccacgtatatcttgacctcgacttgacatatcacctcgtttcctgtctataccacccctcaaggaacagcatggcagtaggcgcactggtttgcagccgatcccctgtttatactaactcacatcatagttccgagtatctttattcaccttgattcatgcccgagcgatgtgtgtatttattttctttgccacttcgaagtccagttgatctgctttcattgcctgtgcttcatggatatattagggagcccgggtgcatgcatgggtcgttgactatacccttttctattttggtatcttattctctttctgcttttggccttgacacttaagtttatctgttagatggttaagttggtgatttttagtattgattacatatatctcgctagtgcactgcgtcgctgcgcgattttgactttcgtgtctgccaataggatatatatatagaagttttcagatgaaagaatattcattgatggaatacagaagaagtaagatattgtgaaatgtcagagaaggcgagtttgagttcctgcaatttatatctacagcgctagatacagcaactaaattatccaaaatgacaagtgtcaagccacccaggaagaagaccaagtgatctcgacccagccgacatgatgtattacgattcctttgagtctaagaaaagaaaatttcctagtcctcttcgactaatgaacctagcttaaccagcatgctccacgatctcgctcaccagcacgccgtccttgaggtagctcttgaactgctctggcagagggcactccttggtatcttcatcggtgccctccggcggcggaagggtgatgttaatagcggaacatttgctagtaaagatctcagtgttgagactctcttggctaaggtaaacggtagcaccatcaacctgatccatcagcaaagtggggaccgtgccgtcgatctgcacagcgaacttggggcacttgatgatatcaagactgctgacgagagagtcgacgataagggagagaccaacgcagttgtcgatggcaatagcgttagctttgttagagaccttgatgatggttttgttgcagcgactgatgaggatggactggttctgttgcgcagagacctcgatgatctcgccaggggcatcaaaattctcgatgagccacttgctgccctcgagttccctgcggggcggcttgcgcgcgcgcatgttttcgggcttcggttttttgctgggtgctggggacttgccccgcacggaactgccctcagggacgatggatccggcgcgcaggttggggttcttgtgcgtcatctccgatttgtcgaccttgcggaggctagaggtgataccctcgccctggttgagttggtcgaagacagcgcccatgtctgctgctggtgccgcaggggccggagcaggaggaataccaggaggcggaggtgggggaggagcgccgccaccggggaagttgagggatgggacagggggaggagggggagggggaggaagggcaccgccactgaccgcagcaggtccggccttgacctgcctcaaagcttccatggcatcaatgcccgtctcattgttccatgtcagacccttggggtagtgtttcttgaggtactccgcaagagccttgaagttttgatagtaggctttgatatattcgacgtgtacctggtccctgttaaattgtcaacatggtaattcccccaaagcgtcattaacaggagtgctcacttgtccttgtactccttcagaaccttatttccgtagtattcaatgccaccgatcatgtccgtgacaaactccgcaggcttgctttcgaagaaccaagcgagcgcaacaataccctccgcaacagcgcttaggtggttgaatagcggcgaggctctgtttgattcgcgaatgttgttaatgctatcggatgctttgtgcagatctgtcattaactccggaggctgagtatcgggtttcttggcttttgtaacaacataaagataggtacgttcagcttggaaggcccgaaggacagctttggactatagatccagtcagcaactactcgcggtagactaagttcgcacaattcctcaacatacttgctcagcaaccagaccgccgatcttctctcctaggttgacaaatttctgaacatcacccttgatcaacgcatcgaagtcctcaatctgcggcgggacgggggcggccacaggggcagcgggcggaggaggggacggcttagggggttgtggaatagcgggcgtagaagaaggtgaaccggtcaaagactttggcgcgctagagtcatcgtatgacatcgccatatcctccaagcgtgaggtcgctgcctcgagcctgcagatgagttcgatgtcagtcaagtgtgccggacgtaggtgtcaaacagcgtagcgggaattgagctaagagcaaaataccagtgaaatgccattggctagacactgttcgcaccaaggatacataccgcttgatgagggtggtgaaattatgcatatggccgccggacgccatgataggcaacacgttgcttcaacggaggaagcggaaaggtaaaaggggtgatttgagtaggttgagatccagggattgtcgagaagtaagatcccctgctatttggtaaaatgtaggcctttgagttctaaaaatcgacacacgggatgatagggagtggaaagaagacgaaggttggagctcctgaggcccgcagatgacggctctagatgtggtatggtacgttacagcgggatccgcaggggaaatgacgttgtgggggtatatttggtaattgaattaccgttcgatccaccctgcgataagtcgaaaccccccatgttcggctgttctttgtctttcttgacaatcagcttctttgtcgtatttatacatacaaagaggaaggccttagctgcaaatatggtggcccaagataagcccgttgaggtcgagttctgcaccttgggaatgttcataattggtatggtttacttcgtcgctcaaagtgggatgtagactcacaggtgcattgttattcagatgatattgatttcggcggctcaagacccagtgttaagaatatcctcggtggtgcagcatcatttgcagtcgtgggtgcccgcttggtctcaggctcgaagtatgcacgagctgtgagctggatcgtggatgttggctccgatttccctacggagacgcttgatgtaatcaagtcatggaatacagcctgcgtttttagaaaagaccccagcaggctaacaacgagagcctggaatgggtatcatcctgacgagaaacgaggtaagtttgcggtgatacatattccaccgaggaaacccacgcggtaactgactgggaagacttcaaatacttgactccgaaactaagactcgagcctgaaatgttgtccgattcacaggtgtggtccaagacattccatatggtctgttctgcatcccgttgtatgtccatagtgcacgatattctgcagcggagagatgaattgcaaaagacagggaaagcaccgtctgtcgctcatgcttcccagcgtcctatctttgtctgggagccagtccctgatctctgcactccggaagaacaggaaaagttcttcgccgcaaataaagtcgtggatgtggtgagtcctaaccacatggagctcggcatgatgtttggccagcccggttggacccaaaagagccaagcaggccaggaaatagtccaaaggattacagaatccggcattggccccgatggaaatggcatgctagttatcagggcaggaaaggatggtagctacgcctactcaaagtccggcaagatttggctccccgcatatcatcaacccagtgcttcaggtgctacgcctgtggtcgaccccaccggtgcgggcaactctttcctcggggctctatcccagggcatggtgactgcaggccgagagccattccaagtcattggctctgttctatcaaactccgaaacttggaaagcccttgagtcttggggtaattacaagcattatcctatggcgctcatttgcgcaactgttgcagctggcttcgtggtcgagcaaatcggagtgccacagatcgatattgatggaaatggaaaggaattgtggaatcggactgaattcacggaacgtgtccgcctgtacacgcagcgattatcgaggacatctgaagagtctctctgagaactattagtcaatcgactaatttccgaacgagaaacgctcttgtattgtcgtacagcacacaagtgatcaaatagtagaaaaacataaaagaaaaggttcctgctgaaaatccgcctacaaccgccatccagtatgctggaccttctttatgagtcgttcttcgcggcttgttgtttctcgtgttcccgaatttgcctgctccagctacaagtgaagaaaggtaaaggtcagcatgatatataccgagtgacatgggttcggggaacggactatcggctggggaagaagcggccgggctctggcatcttgtcgcgatgttcccgatcagcgctgatactgaaggcgatagcagcgataccaaacacaaagacgcccatgatcgcagtgttggccctccagttagctggctgggcataccaaccaccagcgggggaccaaacttccttggggtacctgccagatcgaatccattagctcctggtgaggttatgaaaaacacgagcacatacgggatctttccacctccacccattgtgacgaatatgcaattgaagggtttgttagaagattaagagagcgtaagcctggtagttctcgaaggtgaagccgaaagggccgtctcggtcgcaggtctgatgccaaggcgctatgtctatattaggcttagcgccgcctcacacgacttggccatcccgtgactgccgcgacaatttctcttctctctcgttgatggtatgccaattgattgcgtcgcgattatccctcccgtccattgtataatcttttttacgccctcggaataccacaatcgcccaaatgaagagactgcaactccaaagatggagcagttcagtcctttcgccgcgggctcggactgccaaccgtctgcatcaacacatctacgggcaacggtatcaatcgaccgctcccccggtccaaacccgtgatgatccgaccatacagattttcgaggaaccagcagttttggatgagcaattggctcaaattgtgaaggactctcacacccgccactcgcagctccaatatccttctcccccagtcgaagcagctcgacaatctgcaaaactcgccgctctccacgctcgactctacctaccctccagattacccgtcgagacacttgcgcggacactagtcgatgcatcagcagatccgaacccgaatttcaacaatgcctcgctggccactctcggtcacgacctcctttcctactacgcaaccgagcaccttatttgcacctaccctcgcctacccttgaccgtgatctttgccgccatgtatgcatacgctgggcctaagactcttgccgcgatggcacgagaatggggtgttgacttggccgcgttgcccggtggtgaggtcgatcccggtctgttgcagttccagaggcttgagcctggcaccgaacttgcctcaggcccaaaccacccgacagcacggccatatgaagcacagaagaattggaggaaaacggtcacttctaagattttctatgatgatgaatttggtgacccgctcaaggggatcaagcaatctgccgccggtgtcaccaccgagcaagcgagcgctgagttcgtccgagctgttatgggcgccatctatctgcatgccggccgcgccgctgccaagcgattcttcgagcaacacttcctttcacgacacctcaacatctcagaattgttcaacttccaggcaccagcccgtgacttgacccggttgtgcgctcgtgagagcttcgagcgtccagttgccaaggtcatcagtgagactggtcgtaagagcagacaccctgtctttgtggttggtatcttctctggtcaggacaagcttggggagggcgctggcgccagtctgatggagggccgcgagcgtgctgctgttgccgccctcaagggttggtacctttacagcccactttctgtgcgcgttcccagtgcgatggaggagccatcggccgcaccgtggaagccggtccacgttgacctgggcgaggtcattgtttaaggtatttgttggtgcaatgggatgccttggttcaaggcacggtaacatattatttcatgtccctttttttctcatctcgcttttctttttccggtgtgctattctttcgcatgggaagctagccggcggtaaaaagagtcatctatcctgtctcctgcatgactggatcctgtacattatgggaattccaatcccttcgattcacctggtgtctttttctgctaaatttcccttattgttttttttaacctctgttctactcttctccagttagacatccggaaaaactaggcatgtcatggccctcgctttggccctgccatccaaatatagaactgctctcagacatctattgaatgcatgaaaaaatcaatgttaatggaagctctcttgtcttttgattctgttagttctatatctctagttactaccaaatgaatctaccgatgcctacatatctattcatctagactttacatccacccatcattccgggttgagaatctcatcctcccagttcccactactcctcccgacacacacctctgtaggatcatccagataacgcccatactcttcccacaactccccaaccctaaccccgaaaagacccttccagaacccgataccctgattgtctgcatcctccccttcaccaacatacccaactctcaaaagccgatcattcaacatccccacagcgcccctcccaaccctaacatcctcgagccacgccagaaaatacgctgtatgctgataccccatgtcccacttcggcggccgttcagcagcagatagaggccgtttccagtgcggcggctccagaccagccttgagccgcacaaagtcagctatgccctcgattagtccgcccggcggacgggggatgtcctcgccgttattcttgagggagctaggcggcgcggtgtgctggtagcaatgcacaagctcatgggtcaagactccgaccagctcgtggagcgggtcttctttcgcagatgggccggatgtacagtgctggatgtacgggagcgagacgtggatttccttgtgcgcatcgtcgagctcggtgcctgttgtgtaggctacgccactgtaatcgcggaggaagactgttacggatcttgttggcgggatgctgggtgtgaaaatgggccggtgggggttctcggactttgggggtgaagtatataggtgtttgatgatgttcgctagggctctgtcgagtgttgatgcgaggtctgggatgaaggcgaggaaggcgcttgaggcgggatggcgtaggtcctccacgtgaagacggagcttcggttgggggactggtaaggtgaggttggttgttaattttgtctgcttttctcctttgctgctcgaggtctgtggctcttgctcttgggtgttgcccttggggattgcggaggcatgaggtgcgtgggcggagctcgtcatgatgtatttgctttgattgacagcgatcaactgggcagatatttcgtgttaaagatcttcgactttttatatttgtctgaggtgtaactatggaagtttaggttgagggcggggggattcaacgttataatgactagacccgcccaggtctagggcctaaggcaggatccatgagttcatatacctatatgcacatcgatatctgataatcgtatgtataagccagctaaacctttgaaggcgcttacctacatatataacgtacagagataaacctaaatactttaggctagcactctcaaatacacaccttgtcggcgctggtgattctcaagaggccgccatgctccactttggcgatctcgtggggtgctaggagctttgattcacattgattggaatgaaagaggtgtatggagtaagattcaatcgatcgcgtgtcagttgagcctcatattgatctttatcgtgttagacaatgcagtgagaagcttgtagttgtttactatggcttgaattaccatttttatgcctttttttcagaaaataggcaaattggtgattcaagatcttttactgagcaaataatcggtttactggtgagcatttgacatagagatgttgtaaacatgacgctattggttgcctattgcgacgagtgatcctaagttaataaacaaaccagtgttgggctcttaatagaaccttcgggcacacctcaccatgtaatggcggctggatagaattagacaggtataaacctaggcaggtacttctgaggaagtaacaacccccaataaaagttgaaggactcaagggccacccctttaatatcatctacatccctcgcgcttatcgtcacgcgcttatcgccccttgttttcactttgtccacttttcaacatcccaccatatcgaggtcaactttgcgctcttcctcatattcgtcttctatctcatcggatcctgtatgttattatcctccctgctctgttttgaacccttcatggtcctcttcgccattcctcccttcccgacatcccacacccttttgcgacagatcccgattcccatcctataaccatctgataccctcactctgtacacacgtccacgctatcctttcgcaatcgcaattgccctgcttcttatagccattgctctcttctactggtagaatctgctgctaactttcgtcatcgctagtgacaaatcgaaatccgagtctgttctcctatccgctattgaccttatcgcattttgattctcctggatcgtccattgcatacacccgcattcttccgtctattcccttcggtgcctgccgcgagttgagatcgatatctcggtgtttacaatggaggcgaaggcagcagaactactagcggccttcaagaaccccaacctgtccgttgattcaaagatcgcctacctctctagtgtcaagtccgatatcaaacagaaaaatgttccagagggggcgattcgcgccattttcgaaacactacgcctcgcgatcggctcccaacattattctgttctcggggcggggttctccacactcggtcacctcctgaagcgccttgcaatccaagaccagcagcaatggattgttcaccaggccgagagcttgtatcccattcttctagagcgtctcaatgacccgaaagaacgtataagagcccaggctgcgtcaatatttaccgaattgtggccatttgcgggtgacgaagtcgaatatcatgttctggaaggtgccctggttggaaaaaatcatcgggcgaaagaaatgagcatgctttggttggcaaatgtaggcttatgcaccctgcaaggtctgtctcaggtactaattccgatctacagatgacgaagaaccatggtttgttgttccgtcaatatgttccttccctggtttcgtgtttagaggacgccgatagcgccgttcgagatacggccaagttggtcgtgattgatctgttccggtgagtgaagttatcactctaatcattattcacgaatgcccctaaccgaactcagaaacggccccgcaagagcgaagtctgacctacaaaaacaaatggcgacacgcggtgtgaggaaatcaatcgcgaatgctatcctctcaggtattggcttaggatctgttgaacccgagactgcatcctctacgcgtccaatatctcgggctgaacgctcgatttcggtgatgtcgtcacgttcacatactatggaacagactgatgatggttagtattctgattatatttgtacccttggagatttgcactggttgtactaacatgcctgcagagatggagcctgtgaaaagccgcccagcttctagagctcatcgtgagcgaccggcagcctccgcatctacagagccaccaattgttaacagaccccgcacgccggctccgacaccagcacctcaggaaccgttgccaggcgatgatggtctagaaccgtttgatgttgcctcagcgagggatgtcgatgatcttgtgcgcgatatgttgccctggttcgaaggcaaagaatccgaggacaattggtcaaagcgcgagaagaatgtgattcttttccgcagactcactcgaggcaacgcgccgcacgacttctcgcagacctatatcagtgcagtaaagacactccttgacggtatcctaaaggttgtcaactccctaagaaccacaatgtctagcaacggcagtcttttgatccaagatattgcccgaacatgtggccctagaattgacccaatggttgagattatcatgcaaaacctgttgaagctctgctcggcgttgaaaaagattgctgctcaaaacggaaatgtcactgttgaagtcgtcattaaaaatgtttcatttagcgttcgcctcctgcagcatgtctgttccgcaacccaggataaaaatgttggagtgcgtttgttcgccacagggtggctaaaagctttgatcatccgccaggctcatcataaaagctcagttgaacataatggtggccttgatcttatcgagaagtcgatcacaaaaggactgggagatgcgaaccccggtgtgcgcgaagcaacacgggccacattctggacgttctacggtgtgtggccggagcgagccaatgtgatagcagacacactcgaccccaagtcgcggaacttgctggagaaagattcatcgaaccccaacccatcttcaagaggtgcacctgcattacctacaaagagccccgctaagagtcgcgccgctttaaaagaagctattgctgctcggaagaaggcacagactccttctcaacccgagttggctcagccaacctttgccgaggcgaagccacctgctcctaccttcaggtctactcggagtgtgcctactggggcccctctctcatctctatcttccgcgcctatgaggcctgccgtgaagcctcggcgggcagagattagtcgacctgcaaccgcagacccctacgctcgtcgccccgagtcacgagcccagtctagtaaccaatctacccgacaagcgacaacttcccccagggctatgaggtccaaaccgtcaacacctacgtcaagggcccctctaaacgcgcctcgcactcggccaaatgaatcggcacaagctgctacaactaatggcaggccgaagagactcgatttgtccaagtccaagtcgcacagcgatctcatggccgcgagtcgtgctcgcagtgactcgaatgaaagtctggccaatcagccatctgcaagaacaccccgtaatggaatttaccccagtgcacccgaggacaaacattcccctgcatctatcctattggaaagtcctccgcttgatgcaccacagcctcttctgtactcagcaccgcatggtcctcacgccgactcggttcctgttgaagaaccagaaccaatgacactggaggaacctgttattgccgcaccttcaccttatatcccggaaccagatcttgcagggtctcctgtgcccgtgtctccggctcagcattcagatctggattttggttctggtcccgtatctgccgtcaaacccctgcatgaatcaatggtgatttacgaagatcctacaacgcccatcgcggacaaaaatgagactcctgggtactctgcctcggtgggcaattttaccccctcaaagtcctcccccagtcgcgctgatcaatccgaacatggcggagcagaagctcaacttgtctctgaaaatatctcagcatcggtggtcgcttccgctaggaaacccacacctaatttggctcctacgcaggaatctgttatgaacttagaagctcgaactccctctccaacccgccgggcgccacttcaaccaagcccgtcacctacgaggggccgtgcccagccactggcctctaatatcatggatattgaggccgtgcttccccaagagcatcatgcaggaacgaacgaggccggtggcaacaatgagaatgcgactccacacctggccaagactgtagacttgcccgctgtcccgcggtctccagctaagccgagtgtcctcgaagaagtgacggcaaacgaagctacaccgcgttcgccagaagcgagacagaggtcatttgagtcgataccaccatcactctcccagtcgacgttgtcccaatcatcaatgtctgaagattccacacgacgcactcgaaaatgggtagatcgtcaccgcagccctagcccgcgttcgaaggacccggctaatgcccaagaaatgatccataaaggcctggcacgtattgtgtcgagaaccatggagccctcgggatataggaaactacagggacttatccaataccacggcgatgagattgtttcccaaagccaggactacaatacgttgctggaggctctatttgtggaactggaagcgacgccttccaaccgcaaggatcatgacgtaaaaactcaggttttggccactattcgttccatgctcctacgaacccgcgaacatttccacccctatgacactcgtgctatggcagctattatcagggcccgctgccactacgagtccacttcccactttgtcacttgcttagaagaagttgtagacaaactggtgtttttaactttgccccagacggcaattgtcggtgttctgcagggactagatcttggagcagatgcagagaatgatgagacataccgttccaccatcatgggcctcagtactattcaacagtcgctatcgcgtcccggtatcgatatcgacgacgagcttctggctcgcattggagctgtggtgatgcaacagctcgggcacccgcgccctggggtcagaaagaatgccactgagctctgcacattcttgaacattacattcgggcccgagcgagtgcaaaaagtcactcaacctcctcgtgaaggatcccttaatcttttgacatacttcatggcccggcgaacccagtaattgttctttttttttccccatcagctcaggatcctcttaggaggaccagcgattagtctgaatatcatcatacccatatcaggcacatctcacattcttcactcgtatccatatcgtactaggaaacccctcaggggattgtcctaacaggagcgaagctcagccctgggcagttagaaattggattttaagaggggatccatgagtgaatgggatcatgaagtaatgagatatatagggaagagaagagaggaactagccacctgaaactatacaagagaaaaggaaaaatgaggcatgtgacctcatctgcacactgacattggcgtgcgttgtgcaagtcggatttggtacacgctttgcttcatcagctgtaggtggtatagttccagtggtttggcttttccacgccatcatacaatacccctagctagcttttgacttcttccccgactttgtctttgggcatatctgttttgggatgcgtcttggtctggcgagtggattgttgaatcaacgctatgtaactacaaaaggtaagaaaatatttctgcggtccagaacagtgactaatagggatattcctcgaatctaaaattccaaagagttttcgccgagtcatcgaacccatatcctttggaactggtagctccaatatgctgcagtaaggacgggatcactgcccagcgcgtccagccctcacgatccgctatcttctccaccatcatgtctaccagccaatcggtcgtcaggtccgtctgctcaaggaactcaggtatgatggaacgaggaaagacgaggccctgcgagcagcacccatatttgttcatttcatggacgccacgggttatgggccacattgtctgtcttcccgccataaaatggagcgcaatggcagcggggatgaaaatgcaggatgtgatcaaaatagcgttggttggaatagtcttcagtttggtcctgaatactgttttggaggcaaccatcgtgcccgtaagcagagcccagaccatgaacgaccaggccaggtatgccggccactcttctgaattccatccaagaagctcatcgacataaaagagtcgcatatatatccatttcttattcatgttccgttcttccacaacttcgagagcctgtaaagcggacgagccagcccttcaccgccagagtatcatcttcaatcatcgccacgtaatcagcgccagtgtcgtaacagtctttcaacaaatgagtatagtcgtaaatcgttttgtttcgataccatccaccttcctcccagtcttttatacgctcaaaatctggatcatcttctttgtacgtcagcaagcggtctggcaacgtgctaagccacttctctgagtaaatcggatgttttgacggatctgtgttaccgatgagaatgttcagataaatgctcttcctctctgttttgctaagaccggccaggagagaggccactgttaagcccgtatattgctctctacgagagcgacagttgctattccaagacatatagtaggggtccagttgtgcggtcttattggtttattgatgctaccagtatctctttgaaactcctctgcctcctcgattctgatggacgaatatcgccgctcgtaggcacgagaggggtcgaaaaaataagaggtgggatctcgatggctggcgtaatgatagtagtagaggcagaggacgtaaaggaaggaccaagtgcaaaatatgaggttggtaatcgcaagatgaaatctcctggggcacacaagatgcgacgatcagccattctcgcttgcagtccgttgggtgaaaattatatgagggaggtgttggtgacgaggaataggggtaactgggtgtaccaggcgcaacaccccagtatcaaggactagcaattattggacatatgtcaagtgatagatgggcgattagagattaggttgaggggtagatgtctgaccatctcgaactgggtggtgttcacctgcgactgggggtctatgcccttcggggtatcgtaaatccttctctccccgtatactcgtatccgcttcctacggcggctagaaattgattgtgattggttaagaatgataagctatatactgtaggttgagtttatcggaatgccctcgccctatacagcatatacatcattagccctccagggcggctacacggcagccccacatgggattctctcaaatatacggacttaggcaaagatgcagattgcatgcgttagggtgtttctgattattttctgaaggactacagcgctatggtagcttggttggttaggcaaacacgctgtcggccattgcagatccccaaagcccgggtaatgacagttctattactccgtactccctatagcatggacaataacagcaggtttgagatggtataatttctttacggtcatttttaccgtcttggtctcaccttctcagccctggagactttgattcttatcataggcccagcccctgtctgaaaattcagtcgcagcgttcctagtttggacagtacctgccttgacatagaggtccaatcgcaccttccccagggtcagttatatgcctaatgtataccttccaccttctcgccggatgtttcctccttctgtatttatactttgagtcggttaaagtagaaagagcatcgaaaacccgaggatccctacagtcctagtccctgtcagagcagaaccagtattctctgtttctacagcccaccagcatataaacaaggctggtaggagatacaaagcttctttgcgtgcccattttcacaacttctgcgttacaaacaaagaagcaggcaacagtctcctctacaagggtattgtgatctgctaatcggaattcaatttctgatagacacaaagataacaaagaggtctttgaaatcaaatacagtattggtatgcaaagagccagagtgaatagtctatccggactataaatcgccctctttgcctcgaagttggtatctcatcagcattattttcgagtacccaactcgataattattctctaaccaaacagtgaaataccagcttacatcatgaaattttggaaatgcgtcaaaactccaaagcagccgcctcaaagattcccactcgaggtagcggaagccttcaaacccgaggaagagatcatccgtcgattgaatcgtaccggctcttccccaggaaatctcctttgtttattcccggaccctacacctagaacaagtcttaaccagttccgtttccagctgcaccgagaaaacggggttctacccggcctcgtcggttacctcgagaagtatagcagcgcctcgcacttggtctggagtatgtgtgctcttcttgcagatagcggtatcgatccagactggacagatgcatttgagatgtggcggccacagtggagacagttcgctaacagttttgaaatgcagggaaatatctcgcgtgctttagacattccaccctcaccagtccgtgtaatgtgcgttcgaaaacctcacagccttgatatgtataagctctatgccgttaaccccaaggcgaagaagcgtgatcaagagggtctggaggatctctggaggtggatgcttgatgcaccacccgaggtgattcttcagggagctttttccattaagcttgaggttgagccttgtttccctggcgaggagatatcgtttgctgtctctagtagctggtatgagtaagtttactgcttcgctgcaccatccctttctcttctctatatttcgcgatccaagagccgctcagtggtattaaatagaccaaaaataaatttcaattacttcctggtctgaagtctgaactgtatatataggcttgaggcacaatattacggagtagagacatggaggttcgtcggattaccggatttaacggaatatgtattccgggtaaaatgaggggtgacgatcaggtgacgaaccccatactatataatcaattccagtttccagcttgaaagagtcataacacaacacaatatacatcctttcttgcaatcttccgcggtagatataaacatcatgtctgacctacccaaggttcgttggggtatcattggtatgtctgtatttattcccaatggctctaagtgtcgtggtaagctaacgttttccataagctaccggcctgatctcatcgtggtttgtggaggatctggttttcgactggccagaaaagaaagttgagcatgttgtccaagcaattggcagttccaatcttgaaaaaggccaagcatttgcgaaaaaacactgcccgaaacaaagcccaagcgtctatagctcttatgaagaggtctatcgcgatgcagacgttgatattgtttatataggaaccccacatggggttcattatcgggattgcatggcggcgatttccgcagggaagaatatcctgtgcgaaaaagctttcacactgaatgccaaacaatcgcaggaggtattcaatgccgctcgtgagaagaatgtatatgtggcagaagcaatgtggctccgacaccgaccgcttttcaccgaacttcggcgcttgctccatgaagagaagatcattggtgatgtgttccgggtgttcgcggattttgcgttgggtattgatgttgccacacgtccgtccacatcccgatatcgcgacctgaatttgggagcggggtcattgctagatatcggagtgtattcgcttacttggacgagaatggcactgactggaaatgggtctgatcagtcagagaagccgcggattgtggccgcgcagagccatgaagcaggaattgaagagacaaccagtgccatcttgcagtatccctcgactggaaggcagggtatcgttacttcaaccaccaaagcccccggaagtcccggtcaagtctttgcggttatacacgggaccaatgggtacgtcgaggtcgagggtaggatgccatctgcgccggaatcctttactgtgtggaagaggcctcaagggaatcccgaccatgcgcttttcccgagggaacagtgtcaagggaagaaatacgactttccgcccctggggcgtggctttgtctatgaggctgaacatacggcacttgatatcctcgaaggccggaaagagagcaggactatgccgtgggcggagacaatttatatgatggagatcatggacgagatacgacgacagggtaacacagtctatcctggagagtgatggggctctagatatgtatctttgttctaagggtatcaaaaaatatcaccggaaaatacatctaaaagcaatctgtaattgtagatctatatggatggcagcagcagtaatatgaaaggcacactggtaaagatttacgtatgaaactgccccgctctaaggttaaccttgagtggatcccggcagtcgtccacccaggtggatcctatgcaacccggaagtctggtggtaatctactccgtacaattgatgatattccatatgccactgcgctgtacgtaaaatgatagggcgttttggggcgattgagcgttcttcctcgaaaatattcaaatggcggtgagcgaagcgaggcccttccaacaatctgctctcattgttagaaggttctcatttttctttcgtacattatctgctagttccgttgaccctcctaacctccttcaccaatatgacgaaatatgttgtttacggccttgagagcgcaatcaatgctttctttagctcgagtaccactacaacgagacagcaatgcgatgacttcgccatcgctcgtgctggtggtgtctctactcctttacagatgcaaggagtgtgcagttatacagtgacagcgggacccgacaagtccaggatcttccagtttcgatgcgaggactctacgattgatattggtaatatcagtcttgccaaggcagtccatcccgagttcattgccagctgcaagtatctcgggaccttcggcaatttacagccactccatatctacgagatggagaacctgtctggaatcactcatatcatagcgcgcattccaccaggcgacatgtcccgacaaagtaataccatcaaagaccttgctaggtatgtctaggaaatttgtggcctcgttgacaaaagctgacattatcgaataggttctttgcacagtcgtggaacaacgatcgacgaccatactcagatgacaccgctatcttacttaaggagtttcagtctaattttgaccttcttgctcaagacctgccgtcccgctttgcaccgaacttagatatggttcgtaaggagctcccgttactcttctcaggagcgctcccatttgttctcagccaccaggatcttaacatgatgaacctccttatcgatccagaaactggaaatatgacagggattgtcgattgggcggaatctagaattctaccgttcggtttcgcgctttacgggcttgataatattttgggcctgatgggttcaacggggtggcactactatgataaccaccgcaagttcgagaacctcttctggaaaacctttcgagaagaagctaatgatttctccgatgctgatttgcgtttgacccgcgttgcgagaatggccgggcttttttaccattatggattcttatttgacattaaaggtacggtggaaagtgtgcggatggaccaggctgatggttccctcgcatatctcgatgctttctgtacttcttgttatgaaggcagacagcgtgggtgacaaggtgtctgtttctattatattgaaattatactgcgaacatatacattggtagtcggtcaattaagtagatatatcacactagaaagaaatgattatagtactatagggatgcaaaggaccagatacctggtttctaggcgcagctcctgtactctgattccccgcttcgtacccgcgtcgtgtcacttggcaagggccgggtattgtcggtgggacctgtatcctccatttcgcataggagtcaagtgtctcttcactataaaccatacagagtttttgtcatttttactttcaccggctactcatgtatagatgaatcttcatcttctgtccttaggcaagaaatagaagtatggagaatgatacataattctagaaactgttacggatagaaatgaagcatagaagagagagcggaggcaacgacacggttgatctgtttgcctcgagttacacaaatgcaattttctcatctgaaacattttggaccatgaaagaacatacgagtagaaatttaatttgcaaccataaaccgagagctccaatcaccgtgtaggaaatagactttccatgctgttggattcgctgaaccgttcccagccagttgatgtattcgtagcccgaatccagtagcacccagacccattcttcgtcacgacagccacaggcgctattgtgatgttccatgtgtttacaatcatagggctgacaaatatgactgacgctctttgcccatgaagactagcaccggagaaatcaaggcccgtataatcgaatgttgtccagtgggataccacagcaaagcctagatttacagtgccacgtagcgctaaggtgaaagtcttggatgtgtgatcttcggagaatcgaaggctctgctggacagatatcggagatgtatattgcagtgttgcgaggcgtatatctcgtgcaatctcggcaaccgattcttttttcagctgctgagtagagaatttacaccgaagagcgccaacactacaacgaatgtagtatgtcccggccttcgggggttcaagaaagcggcgaaagtttataatcccaaagtagtccactggattgggcgatatagctgaaggttgaggggaatagacggatttaagataccatgcagcgataacatcatttcgtgtaagttgaatctcggaggaacaatctttcagctcagtctgtgatttcatccgcaattcgtcgacccatgcgcctggaatgtagataaacttggttgtgaactcctcaagtagcccaaacttcatagcaaggatagtcagcagcacatgccaaacagtcattgctagtttaaatatcccactgtcataattttgcgcatgtgtctggtagtggaaattggactccgtttcggtgcactcagttttgacttttatcagatcagacattcggacattcccggcatcaggtggaagagcaaacaaagggattggcctattagacaataggtcagaaaatgctttaaccacttcccaacaatcattgccgtcacatatatggtgcgttattccaaaacagagcaaagtagcatctcgtagaagagtaacacgaagccggaaattgtttgtgcggctagtagagacattgaatatgaatttgtcatcaactgaagatatttccgggcttttcatgatgtttggctcattgctatactggtcgtggtggattggaagataggtagccagtgattcatcaatagccctgctagcgaaatcgacagtagaaccacaggtgaaggaccatggctttgtctataaaatgatatgagcaggctgtagtagcggtaagataaactcactcacatccttgattagatcaccgccaagtattggccataatccaactaactcggtgagtttccccttcagaatagccgaatcgagaaccgcatcgacaatcaagcccgtatagatggtacttagatttcctaaagagctaacactgttgcaagtgtatttcgtagagcccaattttggaccctccatttttaggttgagagagactgagatggggtgagattctttcgtatatgaattattgagagagttctctcggggatttgatagaaaatgcgagtacttttgtactcctgtacccttttcttcactgtttattacgagtaacctcggggcaaatagagattatcttctagatatgaactgtaggacatatgtagtactaacatttatttgcttttttcctttgtttccccttttcgtctttgctgctattttactcgatcattaaacatcgtaattttttcaagcacatacagcgaatgtaataatacattggaacggggacaagtctcgtggaggttgaatagactcctcgtccttgactcaattggcgattacaatctctttgctactgtctggaagtctgcatatggtcctgaacagggcctagggcaatatttcttacggcagcggcgtttacctcactacaaccggcttcacaatgaatatcaacaggtggatcgtccgctttggaagattgaaagagatgaaaaggattactttcgaaaggacttcagaaacacaatagctaagaagctgacgcttgtgtcagaatggaagacccagtatacgcacaatgatctactcagacttcggaaagatatgtttatcgcttctcccaaaatgtggaagtggatccaacaattcatacaggactgggaagagatgccttgatctgctccaaaaatcagaattcatttttccttcatttttttcatgatatctactctacgaagtttacggatacaaatcagccattcatggtccatggcatgaaaagcacgaagccaacagccagatggatcgtattccaactccaattctggctagtggtaggatgtatataaaccgaaaacaaacatcgtgggagagctggggcattccatggttgcatggatatgtggagaccccgggtccactaatatacttcccgccgggcagtgaccaatcacattgtaactaaatgacccacactgtccgacctcaaatgtagacgacttcgaaggaaaacaaatatgtgcttctctttgattgagttatccttagcgcaggggccatgctaacttttcttctctatattctatgtcaccatatgcacgagtgaagtagagctcaatatagcccctgcctcaagggtcggctcgggggtcatcttccgatctcccccagcaactcgggtcggatgcggggtgactgacgctaggcactccaactgcccctcgctcggtaccactccgtggtacatcacttgattgaccgtgacaggtttatccggcagcatggaaatagaggggaagacagagggtataagaactgctggcaacggtcggcccttgaagcagatagcatacccctgggtcgttgcctgagctgtactgctataacgcctgttcaaattttgtgcaaatctaccataatcaagatggcaacaacattaaccggcggaaacccacacatcattcaactacccaaaactcccaaaactacctccgacgtatcccccgatccgcaaatcatcgcccagcaatggctttcggctctcgaatttcaaatctcccgtccagaaaatttgaacattagagagctattccaagctgagtcctggtggcgcgacatgctggcgctggactgggacatgcgcaccgtacgctcagccgccgagattcaaagcttcctgagcaagcaacaacccaaggcaaaattgtccaaatttcgactgcaggatacgggcaagtttcagccacgtctggagcaggtcgtcgacggattgagctggatatcttccatattcttcttcgagactgccgttggcactggaacgggtatgttgcgtttaacccaggcagagaatggagtttggaaggcctatgctatttatacgtcattgcaggagctcgactcggctcaggagcctctcgggaagcgtcgtgctgaggggacgaatgagtcgatgcctggtggtctggctgggggcacatggatcgagcgcaggaatcgacagaaggagcttttgaatgaggagcccactactttaattgtcggggccggtaaggaatttctatgttaagacggttgtctgtgattgagatactaacagtcaataggccaagctggattgaatataggtgcacgtttacagagcctcggcgtgtcgtgcttaattgtcgacaagaacgagcgcgttggagataattggcgtaacaggtaccgggtaagcgacattgaaaggactcgatctatgctatggagagaaatactgatttatcgcgatgcagacacttgttacgcacgatccggccgaattcacacacatggcctatctgcccttcccgcagaactggccacagtttacaccgaaagacaagctgggtgactggtttgaagcatacgccagcattatggagttgaatatctggatgcaaacctcaatcgtctcagcagagtaccacgaagctgtaggccagtggacggttgtcctcgctcgcagcgacgggtcccaacgcaccctccgacctcgtcaccttgtatggtgtacaggacattcaggcgaggcaaaggttccctccttcccgggccaaaactctttccagggtaatgtgtaccacgctagccagcaccgcgatgcgtcggaaagtgatgtacgtggcaagaaggttattgtcgtcgggactggtaacagcggtcatgatatcgcgcagaacttttatgagaacggcgcagatgtcactatgctacagcgcagcgggacatatgttataactgccgacaagggtgtcttcatgatgcacagtggaatgcatgaagatggcgggtacgttctcaaagtctttcctatctcccaccccatattcacataatattaataccaaacgtgtaggccaccgaccgaagaatgtgacatcgtctgtgagagtctcccctggcctgttcaatttgctttgagtgtacatatgacgaagaaaattgccgacgccgaaaaggagaccctagatggactccgtcgggctggctttgaacttgatttcgggatagatggcgctggcatttcacgtgcatactttacccgcggtggaggttattatatagacgtcgggtgcagtcagcttatcatcgatggcaaaatcaaggtcaatcacaatccgggcggtattactggctttgggactcacgggctgcttttggcgaacggtgattccctgccagcagatgttgttgtccttgccaccggatatgataatatgcgcacgacagtgaggaaagtcttgggtgacaaggtcgcggatcggtgttccgatgtttgggatctggattcagagggagagcttcgagctgtaagctgccatttactccgacgatcgtcttaaaataaatgctaatcacactgttcagatgtggcgccccagtggccatccgggattctggtacttcggcggaaacctcgccttatgccggatctactctaagtttctcgcactccaaatcaaggctgtcgagtctggaatatcaaacggtgtacgacagtagatggggagagggcctttgtgattgttcaaattgcatttcatgtgtaatcaaagaaatattgcaactttgatactgcaatttgacacattaatattatctattccgatagatgaataaactccgacgatgcgtcataccccaaatggcgtgtcgcaccacagtagcctctcagcttccagctcctcctcatatgtatctcccgtgaatgcatcactaatgacagcttgtatttctcggggcggctgcgcatcataaaaaagctttgtaaaatcccaatattcaggatagaagccggcaattcccagtccacaattgcagacacgcgcccaaggtcaataagaatattgctgggactcaggtccgcatgggtgaagacagaccggtacggacgcgcgtggacagccgcaatattttcccttgtcgcattgagctcgtatttatggatgaggaaggaattgaattcaacagtctggtaaaacggaccacatatgccggaggagaaacaataatcaaacagtgggccaccaagagtgcctccaaagcagtacggggtctgcagctcggatgttttagcaggggtcaaaaatgcctgcagaagaggataaagagagccctatagtagtttggcaatttagttagatttctgtttctcggtctgggctcaaaatttcccaataagcacctacctccggatccatgtcgctgtcattgaaaaggttcaatgggatcacccagacatgatcgaaccgaacggatacattggggtccgatggtctctggtctagcataagacagtgtgaattgcctcgagcttcaacgagtgtttgtgcttgagatgagactgagtctcgtctggtgactgctcttatgcttagcggagatatggaggccatcgggcattctggggaggctggttttcgactaacacttcgtaaccagtcgcttccattcaatttttgactcatccaggacttcctccggagaacaagcagggcgatcatgaatcctttcccagatatagcaagcagcatattctggatcaacggcctcatctaaaaatgctctccagatctcgtgctcggtgagtgtgagctgggcagattcaatgagccggatagtcgcgtgatacctagctattgaagattgaagccattctcggagatgagcgaatggtatttctatggaactatatcagaagctacaataaacctattgtggttccgttctctctgatgttggtccaactctgaagtcggaccgttggatgccaaggtcggatggacctcgggctaagcgctctcccaccccagatcgtggtaagtgatccaggtgtcctcccttgctgaggatgatctgccagagatgtatcgttctcttcgtggggctttgcgacctttttctgtctttgaaatgacgtgcagattaatttactccagttttggaaaagtttggaaaagtctaaaaaatactttttccacccgccacacgaggcgttgttgtttaccttcctaaaagagaagagctaaccggacacgtgaccggctttttcgttcaccggcaaacatatccccatcaggaatttgacaggcattcggaccaaacccaagccacagctacgaccgatacacctcggtaggttttcgattccgttgctagaaggcgtggttggttagcgttgtattgttaaaattgcataaagaaacggcaatcatgagcgaaagagggtcggaaattgtctatcgagcggaaaatgtcccaattcgcttctttaaagcatgtcgatggtgcaggagacaaaagatgcgatgtgatgcgcgcagccaagtcccctgcttccgctgtcgttctaccggccgggattgcattctggatccgatcgatgatggccggcgacgaaatgatcgccggcggaaaacaacaacccccgcaaggtgagaataaaattatcggtcttagaaatgagaacagcgagctaatatactgtcaaagaagcactgcttcgccgctagaccctaggacgggataccacactccggtaacaagagatcaggggttctcgcctgccacagtgcaagacggtggttttaccactccgattgattctttgcccgattctactggattaggcagcttacagcggtcttatacatctgatacgaatggaccggaatctcagcagcttagccccaatgaaatgatcgcgcctgcgtcagcggtacactctatgtccgtgaatttgctagacactaatgatgtgagccctaatccaaccatttacctaattggcattattctaacatagcaagatctttatggaaagctctgttaagggtgaccctaggggggatgtcgtcgctagaggaatcgtcagtgaggagcttgctcgtgtcatgtatgagaggtatggtactgacagccaaatgaaactgcaaacaattataaccaaatctaactcctcggctcaaggttcacgggtggatcgaagaactttcttcctctttttgatccgatcagagacacattcgactctgtccgttcaagatccttgttttgctttacggttattatctatctggctagtcgcgctgtgacagatttgcgcggagacacgcatatgcagcgtgttctacaagatgaggcacaacgtttggccgaagacagcttcttcgagcgacccactaaactagaaacagtccagggaatgattctcctggctgcctactctgaaaagacatggttctcgattgctcttattcttcgcaccgccttagattctggattggagaaatctttggacactttgctgtcccaagaaaatataccccgaagttcgctctcagcttctatggctgatcgagaactcgtatggaagacaagaacctggttgatcactttcatattggagttggacgtcgcatctggtacgggacgcaaatcacgcattgccgaggtcgatgtggtgaagttgcgcagattccttgactatccgctctcgctgccctttgatatgcgtactgtctgtattattgagcttcatcaacttcgaggtaaagcgaacaaacctacacgtgcgatttatgtgtcaactattaacataacatatggcaggcaattctcgtgtggttattgataacacttcaactgttagcgatattgtgtctacagaacttccggccattatgacaagattgcaaaactggtggacgacatgggacgagatccatgaaagtaggttggcctttcttgctttgatacaactacaatccggatcaactctgactcgaacaaatttgaagacaatggttttcatataggggcgtttcaacgcagcagtctcaagcttatgcttctctatgccaggatctttgttttctgtgcttcactggcacggattcaaaaattacaaccgacgtgcacggattcaaactccgagatccttgaccaggatgtgatgaatctatggcagtcccttgttacgaccatcatggaccaattaaactttttgatcaacgagccatcttatcgctgtcaattaccctgggcgccaacatatccagctctcacaatcgctttcgtcagtaagttgatcatttcctcaatcggttgcatacaatttgctaatacagacttagcaacattccctcttcgcatcgccagatggcgtccaaatctgatcaatcaaacccttctacttgaaagagcagaaaagatctgcgatttcctcaagcaaccaccatatcccgatatccaccggactgtttccatcttcgtcaactacgcacgcgccttgattgccagtcagtgtccgcagaacaataatagtacagatgtacccatcgtgtccggtcaaagtgagggcccgccattccagggagctgataaccccatgatcaacggcccgcctccatcaggggtgggtcccctcgaggatctccgctacagaaccggcccgaccattcaggcagataaagtttcaaatatggtctcaatgccaagtagtgacccatctgcagtggctagagcgccggtatctcggctatccggcaccatggaagcaccgaactggactgtatcaaactctattgcagattcttttggtctgtttgaggaggggcaaaacgatatctttgatttcttgcctatgatgccatcgattccacagtaacaactacatacctaatacaacttattgaatattatcactccgattccactgtccagctgtgtaaatcgtgcaagggccaagttctagccttgtagatcaaagccgatacgtgttctatcgaacaacaaattgggccgcaacgcgcaatgcgcaacgcagtgtacttgtttattcacgtgtgttaagtcacaccggtctagatatccactcaaaatccatcttagcaatcaatttctgcgtcaggggcagccatccatgtccggatcctgcccggcgccgtgagtggattgccctaacagccggccccgcaccggcgccggcttcccacccaaaaaaatcgaagtataccggtctctcattggcttgttgcctactttaatatgatagatagaggcattatgcaagatcaacacgttctagccaggtgagtcaaagaatcttcaggatttttcaatcaaggtccgctggttgcaatgggaacgagaaactttctacttggcttatatagcgcttggtcctcatctaccggtgttcttgagaatcagaataaaaacatacttccaatcttcttcctttgtgttctagctgcccccacttacttgatggtgcaatatggcgtcagaaacgaaacaatctctcagggctcagatagccgccatcctttcttcaggtacgatcaaccttatccggtatttccggtctgctctaacatatattagacaatgatgacggttttgacgagaggtctcttgcctcaacggagaaaaatccaaagtcaactggtgattaccgaatagttgaactgtcccaagatgaattgcttgtcgagttccaggagaactctccaagaaacccaccgaattgggcctttgtacgcacattcatacatctatatattccgaagaattgactaacaaaaccaatagagcaaaaagttctacaatgccattgtagggatatttatagtcctcaatagcggcatatcatccgcacttcctagcaatgcagtccccgctatcatgcaggacttccacgagtccggagaccagcaaaaagtcttaccaactgccgtctttctcattggctacgtggttgggcctctgctattcagtccattgagtgaaaccattggacggaaacccgttctcctctggtctttcactgtttttgtcctcgctacgcttggatgtgctttagcgccaaattggtcctctcttctcgtctttcgaactatctgtggtctggcaggggctgctcctcagacagttgttggtggtatttatgcggacttgtttttcgatctgcgaacccgtggtcgcgcgatggcgatgtatatgtcggtatgttatgatcaattacgttaacggtagaatatgtgaatagtactaatatgtattctaggcttgcagtttcggtcccattctgggcccgatcatctctggatgctcagtcaaatatggttggagatggccttttaggattgacctgattctgtcgggtattacctggctggctctgctcctcacgtctggtatgattatcacttggaccaacagtggcatcagctaatctcaaattaaaatagaaacttttggcccagcaatcttgaaccgacaatctgccaaattgagaaaacattcgggatccaatcgatacttttcgcgtcaagagctcaatctggactcgagattcactccgatggaaatcatcactcgtcccatcacgatgctcttttttgagcctatcatcacctcaacatccatctatatcgccctcgcatatagcctggtcttcttttactttcaggcctatcctatcatctttgaaggtactgctccatctggatttctcattgatctccaatactaacaattgatcgataggtgtctatgatttcaccgtcgagcaaacttccctcacatatatcccaagtatgtgaatttcttttcataatatccccagacatagctaaccatcacagttggcatcggcgccgcatcctccggcttcgtcgccctctactacgacatgatctacgagaaagccaaaaagctcaacaaagcctggacctccagcgaagagtaccaccgactccccatgtcctgtatcgccgggccctgtctaacaatcagcatgttctggctcgcctggacagcaaagcccaccatgcattgggtagcacccgtgatgtccgggttcgtcttcggattcggattccagacgatcttcatttcgcttcttacctacgtgaccgatgcatacaagatctactctgcgagtgcactggccgcttctgttattgtacggagcattgctggagcgcttttcccgctcgccgccgagccgctctataaatctttcggggtttcatgggctacttccctccttggctttattagtctggcctgcattccgattccttttgctttgatgcgattcggcccttggattcgtgagagaagtcccttctgccagaggctaatcttggaggagaaactcaaggccagtgggtcaaatacacctgtgcaagtatagagaaagaggcattattttcgggttttgcatttttggctttggattctggggaacctggtttattggccgggaaataagtacgaaataatgacttgatacctaatttaataaaagttatgatttacaactagaatacgacgccgaaaataaccgcttttgaggccagaaacggcggtctttccactcgtaaccctaaaacaccactattctgcagcccagcacttgaagtcatccacgagtcctactgcggccttacctattgggttagacaattgcctaaataggaagctactcaatcgcttggcgccaaggcagcacagcacctcaagacctacaagttgaagttgaagttgaatagtccagatcggtggatctatccacctccacttactgttcttggcgtataattagcgtggtatcttcacagattcaaaataatttaatatctaagcaacggcgctctcaagcctcaatccaatatatggtagggtccccgcgtatcactaacagcctagcatccatcgggcatattataaataaggtttatacaatatagaagggaagaattagaagaaatctacatgatacgaaatacaagcttaatactagggactaagactaattagggagatattaggcagatctctgcgcaactagaaaagagggtgaattgctgtagatcatcatcatcatcatcatcttcataatgtgaggagtatcaagtgtggagtccccagaagtcacgaactatggagacctggttgccaagtctatgaaaaatcggtgtgccgatcttgtgatttataggacttatggctgttttcttttgtttggtatgtcgtgcaagttatttacatgtgtgcagatccaccgtataagccattttggaagtttagttgtcaaaacaacccgccccgtgaccgcaatgtctcttcctcacgatacataaaacgctcgcctccgggagacctggtctccagcgtcatcctcctttttgattcaacttttcagtgtttcccacaatggacaccccagaaccttccgttctgctccttcccgacgatcccttcttccatgagctgttcaatcgccatacccaagacccagaagcatgtgttatatatgaccgagcctcggagcgctcggttaccccgtatcactttcttgtcgatattctccagactgtcgacagggttcgccgcattttgagccaaggcgaagaaacaccaagtgccaataacatcttcgtttgcgttctggtgccctacggctatgagtatgctgttactatactcgctctgcgagcacttggactcacagcagtaccggtgtgtaagtaccaaaccccaagtccctaaagttctctcagtacgacctgaagtaggctcttgcaagtctttatttccgaacctgacttgtggtgcgtggaacagcggaagccatcttacctgaggagttcgagtatttcgttcaagtctgcaacgcgacatatttaatcacaattccttcactacaggatcatgcagagtctcttctcagtggtactagcctcgccattctaaccctacagcttcccctctccatcacacagccactgccggtgcttcgaaaacctttacaagtatcagagacctggaatacagaccgtggagccattcttctcttcacttccggaacctcaggccctcctaaaggtgtacttcatacacatcgcagcgtctacatcggagccaaagaatggattgaaacctatggcctgacccgcgatgaccggatactgcttccctggaacagccactggtgcgcaggcttcatgatgctgtctggctgtattctcgctggtacctgtgcggagatctgtccaacagtcttcaatcccgcctggttctgggagagaatcaaggctgcagaggtcacattcctacatctaacacctagccttctcggtccggctattgagtggtacgcaagggaagtaatacgtcagtctccacaggaagtcgaagggtacttggtggggtcaaggcggctaaggactgtcgttattgggtcgacaacggtaccgacgccggttgcagatttttggattgagaaagaggtcaagttcgatctgcactatggttgtaccgagtgctggatgatcgctgcgacagactggagaaaatccgaaggtttcacacctgtgagtatcgtaagcctcttgcttttccttcttgttgaattaacgttgtgtgaaagcgtcatgttggaaagctagtgtctggtgtcgaaacaactctcgcaagtgagagtgaaggcgagatggcgataaagagtcaagggttatttcagaagtaagcagttttacttgccatcataacagtgtgaaacgaatattaacagcattggcatgcttaagatatctgtccgctaatcctcacatcatgaacaacgtattcgacgacaatggttattatctgaccggtgacttcatccgacgtggacacgatgccagtctcttcatcctcggccgtgcttctcaagatggtgagcaatactctcgactttcccgtccaaggtttcctacttttgactacggttcacatattctgttcgcaagctttgtccacactgctgatcatcctgttccatcgtcagtggtgcgcttctctggctggaaggtctttactttggacgttgaagacgcccttctaaatatccctcacatcgctgccgccgtagtccttggtgtcgacgatgacacggtgggccaacgggtctctgctcttattgtgacaaaacctcagcttgagcagtcattgccacagaaagtatcccttgccacactgcgaaggactcttgctctcgagcaacaattaccggtatacaagctgccaacgcttatgcgagtcttagccccaggggaggaaattccgcgaaccaacagcggcaaagtaagcaaagcatcagctcggaagaagttcttcgcgtcagatgatcttgattccgagaaagtggaagcgtgggatctgaataggaaagacgaagatctaccgacaagagcatgggattgggctggaattggagcacagtaattcagagatacacaagcgcaatcacacgatgccagacaaataaatgcaaatttccggaaagaagaaaggaaaaggtctgatactagaatacagacgaggtaatagacagatggattgccctataggctggttccactttacagttaggttcatgaaaaggacaatcggcatcttacgagagggcattgggtgctcgtggtattcatggcattcaattttccaatacttccgagcaggttatgacaacgcttacaaacttgtgccgttctattattgcggcaccctcaaaatgtacgaaatatatcttaataggtttacatcacccccatcatcgatcgaattacagatgcaaacaataaagtcccaaagtatgtctacatgagagttactgccgagaggcacgccatatagatctctttgcctattcaaaatgtttcctgatgcattttacctaactcaattcatggcgcggcaacaataacagacataagtcctaaattccccctctctagcctaggcatacgaccgtcaatatcatccgttgtgaaactatctatgccattccaagtcttggtttgtgttgatcgaaactcagcgagcatcttctcttcttctttgctggtcggttcctcgctgtcagttttgttcttgtatcggtcgaacgctttgacgcagaagtggaatgatttggagaattcggcttgcgtgagtttattcgtggtgtcggctgttccctggatgactagagttgaaagcagagattagagacgaagttttgtatgtgggaaggtgacaaaggggggaacaaagttagattctccatgtgagtccagtagatgggcaggacttactcggcttgaagaaattgaacgctcgatcgaaattgtcttcgccgtattcactcaagaccggttccttttggttacctatttgcttgtacgtactcaagacgacaagcagccagcgtgagtaacctgcttttaccttattgctgtgccattttgcggcaatttcctcttcgcagtcgcctcgaatagctgccgagactgtcactgcggcagaaagcgcgcttgttattgccagatggactccggaggagaaatatgggtcgataaagcatcccgcgtcgccgataatgcgtgcatatgggaatgcataggaagatgagctgtatgaaaaatctgacgccgatttgattcctgtgacaagttcgcctcccgataggaactcgttgagatgcggtgccagcttcagagacgataggtagaagtctctacttgacagaccagaggcagcttttttcttgttcatgatttcttggttcatgacaacgccgacggatgtggtattatcatggagagggatgaaccaagcccagccactctcatctgtaagttaccgtcataatcattaattgcatcggagaactattttctgcctcgtacacagttgtagagtagacataccgattagtgcctcaaagtaaggcgagtcctctcttgctgttccgattccatatttccccgtggatctccagtatccccaacttgcaacatttttgagaccttgattaaatgtgcgattcttcaagtatttggtacttagcaaccctttactgccgcttgcatcaataatgtaatcaaacttcacagcgccgctgacaccctcggatttgagtgtatacgacgcagagacaggacgaccgagagccgaggcaccgctttcgtttccggccgtgccattcgaagtaggcggttgtgcgaactcgattgagttgaccttgaccccgtcaaaagcctttgcacctgactttgccgcatgtcgaaatagtaactcatctgcttcggagcggatgacgttccacgtataatgatttggtccacctgaagcgatgaaatccgtatctgtcgacgagcgtcagaatttggagctaagcaccataattgatgttcgctcatagactcacatccctcataatttgcttggttcagtgtgaaagctgcaccgacctgtataagtcagcttgagaaggcaaccaagaccgtaccgataccaaccgccaacatcttcaagagcttgacgcaatattcacatgatactctggacgtggcgggatatggcagtgctggtactgggacttgccttcttcttaaatccatattgatcgaatgtggagtcgcaatcgataaagcttaagtagtaccgcattgaaggtaacatactctcgccgatatgatatctagtcagtccacgttaagaagtgttgctttcataagtttagtgaaacaagtcggagatttttgaagccaaaggtgacaccggaaaaatataacaggcagtatacagggttataaaggggaatctgtgaaaaatcggttgtcatacctaggatgtacatcggcctccaagaggacagtatcgatgccctctcgagctaaagctgcagcggcataagatcctcctggcccgccaccaacgataaggacagtgcaatgctcaggtattgacattgtaaagcgcaggaattgaagatagaatgtgtggtttgaggagagattgattttgcctcaattgacacggcagtactaggtacggagtacatatcggtaattccgctttaggatgatgacgagtaactaaatcactagttatattgtatgtacaccgacttttcagggacttatgcgggtttcagctgagttattgtccaccggatctcagagcgggtacggcatcgccgatatggacccgctttcgcgacaatagtagtaccaaccaccaagactgcagatacctaccatgtgtatgtaaatctctaacaaaattaagtcactttggtcatatcaactgcgtcatctatcaaggagttgaatcctttaggaatcaggtacgctaactaataggtcctactaatcacaaaaccaaggtcgcttaatccatgaaattcaaaaagtggagaaaaatagatcataactgatcttccaccctgtgcccaccttctgccgaatttagcagggactatacctactagtacgtcatgagtgtggaacatgttttgactacggagtacaaaacaatacaatgtttcctcagtcagcaccagaggctttcatatcacattctcactcttacttatggctgcactgggcatcaacaaaacgcagctaggagagcctttgccccccggagatatacatgtaaggctaaccatcagtccaacgcaactaggatattttctcactgatcaaagggcgtgagcgtgagccttccgctatgggaagatacggttggatggtcaagccgaaacccgcaagttctggcgctgctaaagacaggataccctcgattctttatccatcgtcttatcgacagactcgcggagaagattgttgagaggtttcacacgcacaatgaccacttactttctttgtcttcaggaagggaaacgttgctaggaatgctatttccttgcaagcgaagtgcagatcagtgtgcgcaatttctcagaaaaagtcttcccgagatccagacatgtcggttcacagttctctctttctgcaaagagtcaaattcaccgtctagacttcagacaaaattcggtgtagactggcaaaacttggaactgtatgctgtagtctatcccaattcggcatttagttttgccaagtcgttctggcagcacacgggcttcgggatatcaagtcgctatgcagtactgtgcctcgagaagcaagacctcttgagcttgaaaatcggtcgctgcgatgctgagagtgggtctcacgaattggcaaagggactgggccttccggcagccggggatatagattcgccaaaagcaaggcattggatgctgcacagatagcagagtagtaaaaaccctttatcgaagtttgaaatgaaataatacccaaaaaattgacattggcggaatgacgctattagttatacatcagtctaggaaaaagaattacgataatcacgatctctagcacctggacgaaactgtcgacctgagaagtgatatatataatttattcaacgccgataaatgagtgtatacggaaatttgtatggtgggaatagcttcattttctgaactgagcgctgtcatggtaattcgggtattttaatttctgccagtctattgttgtacttcaggcatttgacctatggccgctctgaaggcaaaaccaacccgatatggtaattcacagtttacatgtaagtacttctgtgcaatatttacaagggcacaagggaggcaatgctaaaagataaaaataaatacaaagccgagacctatcggagatagactgggagctaacttggaagatctccaacaacagcgtctggcgctggcgactttaaaatgatttcgcctctccaaaacaaaagtttgactagaaggtccatcccgaagtatctatatctcttctccaggaccaatcattgcaaggcttagctaggccatagatggccaatgtattgttgtctgctcgacccttgggcttgaagaattccgggtcttcaaatcctacgaaatgactgaatataagatgttaacaacctagtttggactccgcatcatcacctcgcaagatatcatgtaaaacctacattgtttccctttcctcgttccatatcaaatttgtaagccagctatcgactggtaactaggattccgatatccgcagctttactaatcatatatcagtatcattccaatcattccacaacaaacagcctttcaagttagataaagcttactcgtattcctctaggaagactttaaagatttttgcacgtttccggcggctactcccagtacatgctatccccattttcatctccaagggcaattccctcaactttttcaaagataatccatgtgataaagccacctcggacggaaccaagaggagtcctgagtcccttgctcccatgctaagagcttaggggtattaggcgaatttctttccttgagggcttggtatgcctctagctcgggcggcgtaaattgagtggcttcctggggtcagacagggcctatatcgcccttggcagagggaatctgcttcacgatacggaggaaggctgtgggtccattaggaaattgggcatcacgacagacgaatttagtggaggctagggaggggtgggaggggtaggagatagcatcttgccattgttcgacgtgctcgttaatcttttggacgacttcccagttagaagggataggctcgctcagagtcaagatcttgcattctgaatcctggataggatcaggaaaccatattttttgatcagccatgatgggtgtctgctagaacaaatttccatgtaggaactgacttatacatatatatggatgtgacgtagctctgatcctttctataagtaacgttgttcttgttccatgaaccttagaactttgctcatcgtgcggtgatttgaacactgtggcagcgtttcactaaatgtctgcccactaagtgcctgtccaaaggtgtcatcgtgcctgattactggtgaatatcccagaccccagtcgctttcaacatccactttccgaacgaaaacggtctcatcgtacgttgtcaagaacgcgtacttgaggtcccgctcgcgcatctggccagccaattgccctatacgttatataaatgttagccttggaacatatcgagtttgggggattatatgatcacacgaacctaggtaccgcccaagcttcttctcatttccttgttcgaatttgattatggccgcatccagcatattaactttcagacgatcccatggtgttttcgcctctccgacgaccttggtggctctggacgaatcaaggactacaaagtctggaacgcccgtgaagggagttggcctcgcagccttgtaatccgcgaatcgcagattatacccttgggtttggagaacagttgtcactgcctgtctatttctttcgtggaaccttctgcgcacaccaagatcgtccccaaccagaacctgctcggttgcgacagagaatgagccgcctatgacaatggcctcgattaccgccggatcccaagttccgttgtgagaatcgtacttggcgacgacatcttggtaagaactctgccattcgtgaagcgccaggtcgatcttggacaaggagtgcattcaatcaaataactaagatgaagaaagaaagaagaagcaagttgcaaagttgaagaggccagttgatatagctgaccactttgcaaatgttgtaaacaactaaccttcaacagtacacagcaaacgccgggatatggaagtagtgggttccccttgctttggccctttcgagggcagctttcaaggcaggtacagtcactctgctttcagtttaccctcacatgaacttcagattgcaaggttgggtgagaaggtgatgatgatagtgatgtcgacaaagcttcatttttacctgcctagacatgtgagttgaactttggtaatttgcttattcggtctctgttatggtacatcaggtattgaagagaggagaccctgcaacgggggcggcaggggcactgacagctctatttgcgaaacagggtgagagcatagtcgtcacttggagtagggtgccagagaggacctaagagaagatggttgaacgtgtcgttcgtttctatacgaatcacatgccgctgagtcatcctgcactacctaaaatcaggcggaattcaggcatcagccctaaaaaaccagacatagatccctgcccgccatggaccttcgcagccaatgccaaacaatcaaaagataaaaagcaaagatgaagccaaaccccatcggacttagatcaataactcgggcgctaactcgaaacctccccaaccagagcgtctagttgcctggcgtctttaaatcatttcgcctctccactttcaaaaggtccagaatcgcatcttggtttattgattttcttgattttcttggtcttcttcataatactcttgatttatttctcgtttctcgaaatgtactcgcatcttgaagctgaaggcacttcggtaactgtcgctcattgcaaggcgcaaaacttacgagttggttcgtgatcccctccccccccccacttccctcctatccgtgtttactcccgtatatgtatggactaacccgacaacgattaagtcgatcgtgttcttgagcctcaaaccgtcgcacatttccttcaatttgcgttcggtaatgagcccctaccaaatggtgttcaacccaacaccgagcgcttatctgctgaggaagcactcttcatcaaaccaaatcaaaacttccctccagactccgatggcgaacccctcatgaccactgtcatgtcccggattggttcccaccgagatcccagtcgtctgtgcatggtcgggaagaacttgcaattcctcaagtcccgtctatgggagggcgtcatccccctgagcgaccagctatggcaggagaagggcctcgaccgaccaaagcattttgatttcgcgtgtcagtatctaacggccgtgatcgccgtgttccagtatttgaatgaaccaaccgtgcgattatatcttcgcgacacgttcaattacatccacgagcattgggcagcgctcgacactgttctcaacagccgcagagcggagcaaggtaaaaatcgcgttagtgtcgccggtctctggacaatgtacatggcggctcatttcgagatgatgagcgagcgcgctcatagatgggttactgtgcatgtcaatacactacgagcgccattactgcgagctcttctagagcatcggccagtagatgggggagccaaccccctcggcgagcctgacgctatgcaatggaagcttagtgatgcgctgcacatgctagctgaaattaccgccaacgcggattacaccatcatgatccctatgaacggttataaggggtatggggcagctcccccgcgggacggtccgccagcacttcatgcggtgaacctacgggtgagaagtaaagcataccatgagcgtgccaggctgctcactcgggaagagctcgcccgtagtgcagctgcgttcatgggttcatctacagtcccttcggccgcagtatcataccatacgacatcccagtgccagattaaaggccagaatcggttgaggaaagagattcgtggtgcacctattgaacccattccacgcgagccttggattgctgcctgcgcttcgaggattgaatccggaaggagggagcgtaggtacgggttcgctgtgtatcggttgacttacgggcagacggagtctgaatgggcagaatttgtccgcaaagtggaagctcatgtttcggattggggcaaagggcaaacaggaagcggcgcgatcaagaaccatttgaggctgcactggctggatgggaaagagtttggtattccagagggcgatatcgatgcatctagaaagtgagtatgccctttccctctcttttttcccctatcctacactacgaagctaacaagccaaccagacacttcgaaaccatcaaaaattccctcgatgactggtcaaagttacaagtcagggctttcctcgccgttgactccgcttgctttgcctcatacaccaccaattcgtacagtgccgttacatcccggctcattccaggtgactttgccggcttccttctcgccgtcgatccagaattcgactcgaagaatggtagtgaatcagccgacgagtctccaggctacgaaggccatatgcgcatcctcggaagtcttgtgtggagtgatctctattccttgctattatcacagacggcagatctcgaagaatactggccattggcaagcgagcacccgaacatggtgtatgtcggcccgacaatcccatggcagcgatacatctggaagaaacacaacgatatgcgctggaatatccttcgagcggtggtagactatgtaaagcgtaacccgggagtgccaacaacgcaagcaccccgggcgcaaggtacgcttgcagcgatatcccagaccgcagctgcgtctacaactacgccaacaaaccctgctatacccacaccgacagcacacacagagcaggaccctaaccacggagccttccgcacattcatgctcctcgagttccaacgctacttacgccagcagggtcacccgcggcgggcggccatggtcgatgaattgctccgtattcagcctaatgaggagccggatgtaggacggctgagacagttggtgaatgatgagaatgaacgacaggagcagcggagacgagatggtttgggtgaggatgaggaggcttcgggggagtaccggccggactgcccattgcagtgattagggctaaatttatttcttattagttgcgaatagttctcatcatggattgaaagggtttatctcgctggctggtctagggagaaaaccatgcatacaaaggtcaagggtgacatattgaaaaacgaaattgaaattgtttaaaacatgaagcatagccacccgcgctgacatcaaaccgcaggaagatacactaaccccgaggcttgaagcccacaccccagcgccaagcttagtcatagtcccgacgagttcgcttgcgaggacgctcatccgggtccacagccttgtgccaaccaacctggcacatatcctccgtcaagtcccttccacagcaaggatgaaagaacattttcggccaagcttcgcgatattcctcagtgtcatatccatcatatccaagtccataggcaatttcgtccttgtcgcacatttcctcgtcgatgatgtcgagctctgttcatacattagttacatttcccacttgagcgcatgtgtgctaggagaatacacgtaccaacgtgatatctacagcttgtctctgagtttcgggtgacgtcgaacttttccatgcagtagatgcagtttgcaaagcgggatgtcattgggacgctgacttcttgctcagaagtaacgcgcgccgaagtgacggcgacctcagaagtgacgcgggcggtggaagagacagggagaacgggctcggttttcacatcagcctttggtgctagtagccattctgaagcaatcttgcggccttcagggctgttcttgatgatgtccttcaggataccctccagcagtaatttagattgtttctgcatttctactaggaggagtgacaggttctctggttgctcgtcaggtgaaggcatagtgacggttgaatgaagtgcaagtaacgtagggagtaaagaaaggtgaagatctgttcagagactttgtgtctttttgtgggctgcaacgcgcgcgtcctttggttatagaacaaacacgactaatcaaaggggcgcaccgcagcgaacgcagcatctcatgacaaaggcatatatgcgggaatgaactattgtatgtgcttcggtcgcactacatcgtcatttcaagagagagaaagactctgtgccaggctattccaatccgagaagtcgacaaagttaggatcccaaatatcaatatcgaagcctccgtcaagcctcgaatccctaatcccaggtccagtcccatcagcacagacaggacaattcccatggacaattggatgactctgctcatgcgcctggcgaatacgccttgccttattccgcagctgcacaatcatcggccatttaggacccgggtccggccatgagggatcatccgtcaaatcgaactgcatatcgatagcgcgccaagctcgttcgacatgcggaccagtggggtaaacacacagagtccagagaatgaacgtgaagaggtggtactgggtgaaaatcatcatcatccagcggaagccacgcagtaatgcgttgctgttcatctcaaggccaatttccatgccatagcaggcttttgccagcgtatcttggacgaggttgtggtcgagtgaacaagccgccggtccctgtgactgcagctgtttctgtcgaatgcacacttcgatctttgtgaggagcagccggccgaggaggaagccgaagcgctggattgggatgtttgggtcgctgtggcgcaggtatttctcctctattgcgcctttaaactctgcaatgagtagctcgggatcagatgctcctactatgcttcggaccaacgccggccgtctgctgttgatttctaggacgattagagagaatgtcaactcggtccatcggttctctgatacggctgggacgatgttcgtctctgataaactctggtcgtcgacgttcaaaggaagttcggtgtcgccgtagttgctttctgggacggtgagcccgtggtcctctgccactcggctgtcggctgatttgatatgtccccatgttcgtcggcgtagctcgcattccaactgtgggagtttgaaatgtttcccatcccgatggagaccgattgattgtgcggctcggatagttactccatgtaatatccagccagaccggccgctattactaaatctaaagcatgcctagagggcaaagagatgtcagcgatgacaattacaaaaacattgatcaaagacacatgaagcaacattctctcacctgatatatcaccatcgcttgcaacgaggtaagggttggagaatccaaaaactcagcgtgatacaaagataattccatcccatgttggtaccgccgcagattcgcatgcaagacctcattacgagcatcatctgaaagcaagcttgtcgtagcggcaaaacaaatagcaaaaagcaaagcacgtacatcagcacgcacactctcaggctggttaatggccgcaaagatacgcgattgtgccgtcggaacatgaagaaccttcaccaagggctctacacgggcgataaatgtctgccagagcagaaccgcctcccaacgactgggaaatagctcttgggtgttaatctgcgccgagagcgggttcgtgaagatgccatctgccctcaacatcggcagtctatgcggactagttacagcgacgggtgattcaattgcagatttcagctcctgctctttttccagcacccgcgagagaaacggctcgttgatatatcggccgtctttgcctaggaacccctggtgggcggggcattctgccgcagcggggttgctcgatgagggtctgcagtcggatcggctattcggcgtcggtgggattgtactcgggcctgggctttgactgttggtagtcggtcgttcgtcgatcatggatgcgatgaactgttcaagctgttctaaccgtactgcaacatcggttgtgcttttcttcggggcttggcgcttcactcggcttggtcctggatactggcaggttacattctggcgtttgcatttgctgcatggtgagcccttgtcgcatttgatcttgtgctcgtggcagcgtacacaggatcgctctacgttgtaccggcgtgggtggtccatggtgctgtttcacaagctagcgaaatttgaggtcttggtactaggttaaggagaatttctttatcagatcctggcttctgcaatacattgactatcgagcgtcgaactggtgatgtaagttcggtgttcggtcgttcgtgaattaccgacgtccgaaaatgtgggggcgaaagccgcttggctcatgccctatttcccgtacatcagatgattataatgcgaatggacggcctccagatattgtgatggtcaattttattcatcctttgttcaaatattgacctccaggtggaatatcccgccttcaaaggtcggccaagtaacagaacacacgcatcaatacgtgtagacgttcatttgccaagtacaatcccgaagccagatgctaaatacaaagaacgctaataagaaggcttctgggttggtcccagaatccagagccgccaattcccccatgaaacagatattatgaaataagaagatcgcggacactcatgccctttctccttggaatatcagcaggcgcagctggggtctcctccacagacagcgccaatgccgtactcccagggaaattctcactgatcgaatcagcagtccctctccgatcctgagtcagcatgagcaaagctgccgaagcctcatgatcaaccccctgaaactcctgcatcttctcgttcgacgcccatatcgggcccagtgccgggctaggaaggatagatgacgcatcctgcgggatattggctgaggggacttgggtgcgcggagagaaggacggggatgtatcggggaattctgtgggagcagcgcgcaactccggtgatgcagaggtggagtatgaataagcagaagaactatcccttcgcataggcggctcgcctgtttctgcgatgaactcaggggatgttggagaggggggtgcggccggggtatgtgtgaatcctccagtcttcatgtcgcggatacatttctctaggtaattgacatagtcaatgcttgccttgttgggagagttagcatgttgtcaaatttcggaagaaatgtggctgtacctgaagaatggccagcttatgcatttcctgcccggtgcatgctgggatcatgtctttcaacgtcccgaactcctcgttcatcttggaccgtcgtcgccgctcaattagactatgtgcggtcttgcgggcgatcttgcggcctgcagcactagtcgcactgggctgtttccttttagagttcgatgtggggggcattgcgtcttctgaactctgtgaacccttgacattttccctcgtcctggtttttgaaggtgactttggcttcatctggatgatcttgcgagttctggttggtggcggaggcaaatcaaaatcctcgagcgggcgtttgatcgatgtacccgaccgtgcagtgtgacttgaacgacggccagagagttctggggaggttggtgatgccggggcatatgaaggatctgagcgagaagatctccgactggcgttactcaatgcagcaggaggtaatgtgaatgcatccccgtcgggcttatctttgatgatgaagccgcccgacatggctggagttggaagtcgtgacattgtaaaatggagggggggagaaatatgtaaataggtgcagagttgtacagcaaggggtccagactatataaccgtgaacgtcctcgcaggccaggttatagatagtgtcgcgtgcttccaaaggttacgcccacgagctagaaccggcgatgctgattggtggagcggagactcgtgcctcagggagcaacggacatttgctggagtcaactgtggggccatcccgagcttattggtaggtacctggtacttacattagcgtggtggaaaggggctgccccgtggtacctggtacccattacatcaattgaggtagcgcagcacgtgcatcgattggaggacagtctgcgctcgacgattacacggacgcactttatgtctcgtttttggcgacggcaacatttatattcccattggctggcgatggcctgtgtcggtctccatccacggttacatctgaagacttttccgttttgcgtgagacgccctcttctccctagagtacccgcttcctctcgagtcatccacacatggcacgtgcattctctttggagtcgaattgtggatgccggacaagctagctcagggacgatctgtttcggagttcgaattgggaagataacgtgcaataaagcattcatatcacatgatcccatgaccctcatccccttatccaatctatttacagtctcgttctcgtttcaagtaagaggaatagaacgaaagaacaccggttttgaatagggggtggagttcgagatcgctatggggcagttttctcagtccaaaaagtcaaaagcatattccaatctctatagaaatcaacagctatatacgtctatatccaccagatgagttccacttttccaccaaacggacattagttgaagagcctctcaaggatgatattaccaaagtcctcctccccaggagactcatccatccgccagatgcgattaccagcacggccactcagccagagaccatggtcacttgagctctcctcctcgccttcgatgcggtgacggttgcggcgatcggtaacgcacataccgcgagtccactggcccaatgtgtcgactcggatgtcctcaggcgagtttgccgagtgaacccacttcgggtcgtcggatgtcaacgcataccagacgcatacagggtcgtgcagactcagcatggcatcgtcaccaacatgtccagggtgcaggcgctccaaggttctgaaggtgtgccccatgaaggcatcgacccactcagccagcggggagccggcagctagaagaggcgtaatggcctttcggaactgtccgcgtgatagattgtgacgcagggtgatgtcaagtgggaaaagacgcagagtcagttgccggctaagacttttaggatacggtgggagactcccgctcttggtgggtggaactgtcgtgtggggattgggcgaggtgagtgcgaagatacgcgcggctgccactgcatctgcgtaagcgttgaactcgcccattggtgtcaccttttaatatcagccaacgtttctcaatatttcttaaatctggaaaaggcttgacttacatttcctggctcattgatggcaccacccatgacgaccacctctttcacgcggagaaatgcctccgggtcttctgctgcagccaaggccagattagtgagcgggcccactgctaccagagtcactgaatcgggctcattatcacggagcacacggagaatctccttgtatgctggaagcttggacggggtgaatgcgtggtcgtcacttgagcagtcctcgacaggcttaattccctcatccaaagttttagcgaagaggtgctcccatgccttagtagcggtgagatgcgggtgcttttagaaatcagcatggtctacttgtttttaagccatagcaaaggcccggctttgtatgagcttcacataccgttgcgtgaatgcccccaagtccatcggttccgtctgcggggatgtcagtaaacggtagctgaaatggtagagtagaactcacggaaatagtcggcaagcattttttggtcttcaagggggtcctttgcaccgacagccaatataggacggcaagctctcaagctgccgaagccttctggtcggccgttctcgcggcgccactgcatctcccgctcgaggatgtggaacattgacactgcatttcggagacagctggatatcacgtcagaaaatgtatctgcttttcaacccgaaatgattccttacttctccacctcgatgttaccgaatgtcaatgagatgaggagaacctctacctcctccgcggtggcggacagagctagcaaaagggcgaggacatcatcaatgccctgtgctatggttaattctgaaattattgaaatggaatctcaggagcataccggatccgtgtcaatgataatcttctttcccatggtgaatgttgttgaccttcaaatgttggaagatgacggaagtgggagcttatcgttatcagttgttatcgggctgcggggtttcgtctggctatgaacccctcgtatgcaaatcatatactgcacactttcaagtgtatattagagacaccactgttagaatgatatcaagtgattgatcatggtatatattcccaacgaagaaaaatctactagtccaggcttaggactgcaatcccggtgaccgacggtccgcgggcggccaatccccgttatccacccgagcctcatgccccaccagatggcggcaacattctcggtgacaacatagttcctgctcgtcaaaatttctacgtggaacactttttgacggcacttttggagggattaaagtgatcaggagcttgtgattgttactagaacatgtgtcttgagccaatcatccataaccaatgtcgcagaataggtaagaaccaagccgtagcagcatttgcatctcaccctcaaacacgtggatccaacctcggtacctgcaatttctagcgcttctgatagcttgacagcgtggcggatgtcctcttgcctgtgaactagtggaggagcagaaaagcgcctgcatttaggttggaagctattcagacagagaacttgtatcttaaacttcctagctagaacacaaaaattgagggaatgacgtccgggtcttagcttatttgtccgtagactgggtgactaccgacgcgttcatactacgtgcacctacccatcttcggctacggagatttacacccctcatgtattccgtgggacttttcaaatggcaatgagagccacgacttcaggatcgtccacgagaaagcccggtttgatgtttgatgcagacctacatggacctcataacaaatatcgtaatgttatggtccctgtggtaggtgaagcagcatgtgctacgggtccctctgcctgcgctgtctcatggggctacggtgaaatggaggtcagagggatggggaggagagaaggagaaaagaagaaaaattggggaggaggggcgcttttatacccccaacccacgtgccttcctaaagtgcgacaggtccctcgcaccttccctgtgttctggcccgggaaatgagaacacaatcaaaggctcagcactggatagatagtacgtgagattataaagcgtcgcgtcgtttctatgtacagttggtaaaatatttaatgccttttcttgctgcagattgtacaaggtcatcacctcttagcctctaagcttcggcgcctagactaggcacaatttccgacacagtctgcacgtccttgtccccccttccactgaggcaagcaacaacatccttccccggtcatgtacagccccggcaatagcatgagcgctttctcatgcaggaacaataccttccatgcgacctagcaacgaaaaagcctccagtacattggtattattggccgaaacaaacgacattcgtccactttccttccaactggccagctccgggccaacgccagggtaatccagccccacagagatgaattgtgtgtttgaaatctgactactttcgtctttgtggtatataagtgctcacgctgtgaagaacaccaactgagccgcgacctagagttacagaatgttgtccggctagaggcccgcaatcaccagcttcaacaccaacgattgtaaccgatgcatcttataggaaatggtgggacatgcctgccgcgattgaaccgccacccacacaggtgactatggcagtatggagtcgacttccattcattgcgagagcgagtctccgtaccaataccattttgaaacgtccgggttcgggagttgatctggtggatatcacaatagttgaaaatcgaagacttggagacatatttcaataatatactccgtacatagggcttattagtcgcttattttagttcctagtcatgcaattgaaggctgagggcccaaaatggagttgatacttcccaggaagttctgaaaccatgcggcgactaatgctcatcatatcacttctcttctcatacgtagtcatctacgtaagaggagagaagggatcaactaaaggtgatgataaactgtgtccgacggatggaagataatgatctagctactaccatgaagctctctaaatatcttcatacaaacaaagccacaaagatctcatcctccagaatctagaagacacatctctgcaggccagataaagagactgccaagacggcaagttgccttacagctgctacggctgcctgtgagaagagagaaagagagaaatagatgccaaaggagaggtctacaagctgcatagggaaatagtgaaagcccctaaaagcatcaaaatctagaacagaggtagaatgaatactgtcagagaagtaaatgttcgacccctacttctcatagaacaaagaccaagtcgtacagcagaccaccaatcaaggcaccgctaattgatcccagataagaccagcagaggcaagtgacattccgaaacaagtcactgtcgtagcctagtgccaataaggcaagccgggtcccgaggtctcggcttggattgaacacagctccagtttgggaggcgaaggcagcgtgaaggcacacgaccacaaggccaaaaatgattgatctcataccggtgctaggactcttgtcgtcaacggctagaaccatgacagccaggaaaagagctcccatgaactcggttataaacacggtcgcaggcccgatccccactgcatattgaacggccacgaaactggacactatcagattttccgagctcgtagtgaggtaacgctcgatggattggtagcagaggctatacgcagcaatggcagctaagaaagcccctagaaactgagcgcccaagtatctggggacttttcgtttagggaagccgcggtagaaccaaagcacaatagtgatagatgagttgaggtgggcgcgagatatattgccagacaaataagtagcgatcatggtcgcagacccccagatccaactagtgtcggggtgggacttgttggtgacagcggcgatatttgcacaaaagccaattgcgagctgaatgaagacagctgccgcctcgacaacatattccaaaaggattccatggatcacggagcgtgtcctgttgctgatgtggaggtttacaggcatgctcaccgtagcgcctaaccgtctgtctgagtgaacatttagatcttcaggcgcttgttcatgaagctcgccctgtcgtgggcgtttagatttcaccccatccaaaatgagcaaggggcctggagcggtgcccagaacagatgccggactaactggcgcggtgctggaaatcagaagaacgctcttcggtagtactgaattgatggttttattattgccaaatgaggagctcattcttgagctgtggtcgttgttgcaagttgtttttcgagagatgctaggaatgctgatttatgacttcgccatctgtcagctatgctttcctccctgcttcatgttgaacttgacttaccctaaattctggccgtcttgcctggctccgctcatttgttttgtgataacgtgttcgtaagacaaaaacaaagagaaagaaaaaaaaatcgaacccaagctcaaaataattagcaaagaaagtagactcaaaatgtcaaattgcaaggaaacttgtgttcaattctttcggccgaccaatcgaggccaattattcctgcctggccccttgatcaggcctcatcgcctttgacatatagtttccatactatatttggacgtccatggacttttaactactagtaaatatttatcatttgatacttgctgagcccccagagacatcttgattccctcttagaatagccgtgttgtttattgtgaaatataaagccagacagcgaactgtgtgtataccacatttggtcactcaagaatcactgccgatatacggcagatccttgaaaatctcggccgagataatggagacgttttgatcttcgaaaaaaaaacatggcttgtaaaaagatccttatatggaggattagtcgagtttgcataaggttgtataaatcctgggtatagggagggatatatagatggatgggtcagacattggcaccgtagagctgccaagatcataccttgtgaatgaaaagagtgttggacttgtacttaacgcagtatattgggattcgaacctgactattataccctcatttttgctgcctctcatgccgcttctcagcctctgaatcctgatttcgcttggcaagggaacgacattggtgtattttgacaccaaaaggctagcttgcatgatacatgcacatatgtttccttttttcgagtgaaatttgccttacccggccctaagtgcatgcttgagtggcttagctaccagaaaccctgcgaatggtcttaagcccacatgtcatagcctccgcatgatcagcagtcgcagctccaggtgtcgggtgtaaataaagatgtgtcataagccacaccataaattgggtggcgttcctttcgaaaaactttgactactccgtacatgtctcgtgtcgtgacctttttcttgtcgttcgattcgttatgctttccagggacactttacagagtccacaaagctgggatcaagctaatgggaacaacctaagcacaatccggacgaaggcacgagtaagtaaacaaaatcacgctctagacgccgccacgtttcttggcaaacctatcaatcagaatgggcgatattccacctcgtatccccgacacacacacatcttagcgcgaagtgaattcggcgatcgagaacctctaggctactctcgggcaccatcaatgccactacagaacccggctaacatataacaggacgataaatcaaggtaagcctgagtatggcctgaggtgtttacaaaccgccgtacctatatatcgcagatattagcgtccatagcatgccccagcccctttttcacttccccgccggtcatctctctcgtgtttgcatctcagttctttcgtcttcgctgtctcacaatgtcacttcccgttgtctccgtcgcgggaaacgggctgttgtccaaaggcaaacgattccaaatcaaaggtaacttcattaaaaagaatgtgtaattcatgctaacatttccaaactaggtgtcgtttatggccgaagatcctctcgctcgactccgatcgacgttttggccggttcaagagccagtcagtgcgcaatcgatggccctatgataaaggcactaggggcgaatactatcagcgtgggctacatagatgcgacccaaagccacgataaatgcatgcaggttttcgaggacaatggcatatacgttcttgccaacatggcgagtcaaagggattggagccttatgaaatatgacaggaatggatgtcagctcgaacatagtgagtattttcggtcactatatgctcgctacatatgggtactaagattcccaactgcaggccaactccacatggcaaatgaacgttttcaaacaatacgcggctgttctggattcaatggccggatacaacaacctcttggggcttcttgttggagatgaaattattagtggtatgcagcctccaccgctcacggcctcaacaagatttaaatgcataaaataggctatacatcggtcgatctagccccgtatctaaaggctgcagctcgagatatgaaagcttatactgctgctaggcagtatcgtcctataccgattggatacgccacaagcgcagagtatacctatatgcaagcgctaggagaataccttgtgtgtggcggtaacagcgacaatgctgtagatttctattcggtcaatgactaccagtggtgtggcaattcgtccataaaagagtccggctacgacaccttgacatcgaaagtcgaaggcctatcggtacccacattcttttctgaagatggttgcgacgaagtatctccgcggctctttggggaccagcccgcgatttttgggtctaacatgtcaagtatttggagtggtgcaatcatcgatgagtggaggcaggagtaagttgcaacccttgatactcatttgacatgtactaacatcacacaggacgggaaactacgggcttgtctcatataccacttcaggagtcagcacgccaacaactctggccgactacaatgctctgaaaagccagtggtcttctatcagtacaaatactgaacctccgtctacgttatctaccccttcctgtcccgcatcgatcaattcatattggccgatagaccccagcgctgcattgccaacaatagcgggtcttgactttgcgaccatcaaagccgcgggtgctaccgatactacggatagtaccaggacgagtatcagtacgagcaccagtaccagtagcagccatagcacggaatccagcctttcaagtggtgcaaaggccgggattggtattggtgttgcgttgggcgtggtgctctccatcagcttcctcttcctgcttttctggcaccgacgaaagattcgccaaggaagcaaattacctttgatgacacagacccccgaacttgctgcgggaagtttgaatcgtattgctcccccagccgaactagctcacactactccgctgggcgaattagcccaaacaaattcattaaatgaactaccgggttcatctccgagggcccaagagcttgacactggggtggttcacaaggctgacaagcctaaaccaatcataaagtgaattacaacatctggatggtcctaagtattagctatatcgatgcaacctctcaatatcggacaatttatatgctaggagtaggtctattcttgtatgtctaactatgacgccaattgcagaaaatttcggcctctcattcttatgcttttactttctcccttagatgcagtcgacgtttccatttcatgcggctctttctcatcgcccgctgagtcctctctagagggtaattgactggggactcgccgccagtgaaaaccatgaagtcatataagaagccaccagcgaaggcaccacttatggtacccacccacggtccataaaaccaatacggattcaaaaagaggtctctgccgtagccaagtgccagaagggcaaggcgtgggccaaagtcacgagttgggttgaatgcagcgccagtctggtaagcgaaactaatcattaagcaggtgatgacaagcccgataatgagagagttcattccagcaccgggaggggcgttctggtcgtcaccaagagcaagaatagtggtggttaacacgatggttcctaagaactcgttgaaaaaggccgtggcaggcccaatccaggcttcacgctgattggtcacaaagctgttgataattccggtatccgtatttgtgtcgatactgaggtggtgctgaattgactggtaatagagcccgtacgcggtgagtgcagcgcaaaaggccccgacgaactgtgctatacaatactctggcatcttccgtttcgggaagccacgatagaaccacaacatgatagtgatagacgggttgaggtgcgcaccagaaacacctccggagatgtagattcccgacatagtggcaaagccccaggcccaagcggtggtattcgggtttcctgcatcagcaaccgtgacagccaggtcagcgcagaagccaatgaagagctgtataaagacccctagagcttcggctagagcttcgcgatggtgagtcctgatcacagaccaggtagtgtggttgttatgtacctcttcctcaatcaacccttgtacaaggggatgtagatcatcaggtaaagcctcgtgatcaaattcaaggctacctattgtaaaattatcctcgcgcaagtcctgtggaggctcttcgctcggaagctgatgctgatcctccccttcctcgacagaggacagcttggttgcattaggcgaaagccactcggagggttgtctcccgcgcattgacgaagtacgagatacccggctgaatccagcaccgccgcttaggattttgttcataatgttgctctcacgttgcaggcgagcatcctcaacttgggccgaaatctcctgtggatcagcggacttctggatctggcccctctcgatatcattggggtcaatgtcaaggccgagcttctgtgaattctccgctggaagctgagcagaggcatggttttccaacagctccgctttggttggtaccatgcccggccgtaccactcgaggcaacggtttcgccaaactccatactggcttggcgttggcaggttgctcgtaggaagggttcaggtcgatgtaacctggttggacgaacggttcatgggaaagtcgcaactgagtcgtctcgtcagggccagcgacaatgaactccccctgagtcctctctgcgagcgtggtccgcggtacgagactgggtaacacgctccgcctagaggtcactgagctacgccgtcggacatcagtgccgttactagttgcatcgaaggagacccttgtgggtgagacgaatgattcgtccgctcgggaacgggtgcttctcgccggcgaggtaggtgtgtctacagactcggactatggatggaaccaatggtcagtcacctcttgcctcatttgtgtttatctatcgttccttcctcactcgcgttctttctttctctgggttctttttggaattaccttagtccttgcaagtttgtttccttcggcatctcttctttccatattccagtcgatgattcgaggtaatttcttaagtgttaattgaaaaaaaaaaacaaacaatcgaaaagagaccagagaaataaagggtggagaagtatccgtataggctaggttatcaaattattagggcttctatttaccacacattgttactactgtttcaatacacaaatttcaaatgaacacttcgtttaaaggggggccaaactgaacaaatagatcgtgtcatcggacgccagcaccgatccgcaatgatgcgtttgtcggccgaatgaattcttcgagttattttgggctattacggagtacaggccatatacgaaagcctagacttgattccgtatatcaacgaagcatctcatcatttgaatcgtccgatgtcatggaaaattatcctcgcaacgaagattcatgtaacaagcatcattgctatatgtgctttatccgccatgcggtccagtctggaagtcgttggccttcaacgattctcttcctcggggctgcttttgagattcccctcattcttacaacatgccgcaagctcttagtgctacggcgattcctcgctataactaccaccgtacaccctcttaggatccaatttgatcattgttaacttgattaacttgatgacctctttacgaactaaatgtttcacttctatgcaagcattgcttttgtttgaatccttatggcctcgtgatggcctagatccctctgaatatcttttttttatggtctctaaacgacccaggtgatatttcctgcctctttctccgatattcaaaatcgggacctcacttcctcgaataccgcgctcagaacttgtgtgtatcggcactaaaaactgaacaatacctgcttattgtagtcaggcaataaagcttgttcggctaacataaaagcttaatcttgatatagtgtcactacttttcccctcatgcggggtgcggagaatgcttgtcaaaggaaagtcacgcatcggcgagtcttaaacttacacgaagaatatagtagtaaaaaggtttacgttagaggctggcccaatggaatttgtcagcattcggtagcaaaacttgaagcctagtttggagaaatcagtcaaggcagacctcgagatatgtcggccgagatatttgatgtgcctgcgagtggtacgaaaaaccagaatacatgctccaaatcaaacctgctaggagagtgtaaatcaataagtatttgatagttgatagttgatagtcgtctattcgtagaccaccggcaaggatagatagatcatagccttaatcccaaatcaatttcaaagccggtgcttgaactataccccaagtagcaaggacttggttagtgaagaccctttgggtttataaagaatggacgatacaagatttagaataccggggcataatctgagtaggatcaacgccatagatttgctcggtctctgtattcgacggggcatatcaaaggtttaaatattcaatatattggcctgattataagtagcccgcaatatctccctcccacttggagcttcctagcgattgagccttcacgaagaatctcatatttcttgtcaccctcgccatttcccatacctcaaacagttatccctctgtactcatctccattgcttgtcaccgcgatgtcagatatgacgggatcagcaacccagccaaaaggctattggctgtcctcccggcctcggcatcctcacgatgtctagccgtgctgtccagcaagtgcatttgcgcaagattccaccaggttcatattacgcctcgatcgcgaaacggtaccctgtcatgcaaaaatatgagaacaacgaacctgcctactttaccacaccaccaactcaactcatccgcgctctacacgctactctaagccagatcacagctcgacctattgctgagcgcattgccattcacggcaggcttctgacaagattaaggctgctgtcactcggcctggtctgaaacaggttgctacccgccccgagtgccaggctcacgggctgactgcaatgtacgtacctcctggtttgaccccgcctgacgtgctccctggcatccttaggcgcggggtggtatttgcggctggcttgcataagtaaatagccaatcaggataatcgatttggtcatatgggtgtcagtgttttggatacagatcgcggcgatattgagaagggtttggtagctctgacgctttgactgaggcgagacagatcaaagggatgtagggatgaaaaggtggctgtgtactggcacagtcaaggtctcagtagtagttactatccatccatcgtctgtaactcgcttactgggatcgaggaaactaccacaaacctcgacgaggcggtaacagaagcctttgtaattcctagctccaaatcgtgattctatgcatactcaagtcgatgacctacagcgctctccgttcatttctcatgcagtccgattattgtccgtcacggcggcaacggcatctatctgtttgctgagggtaaataaccctgaagaccaacggggctgtatttctcccacatcacctggcggtcacttccgcgtgctacattagttacttagtgttttgaatgatagaaccttctccctctgcgacgataaaggtttcgacctccttttttttagtttgctgagaggttgtttgtgactcgacgccttagggcgggccggccccgccgcctgggcgcgtcgcggagtctttgtcgcgtcggtgagccaaccacttacaacatacccacaccgcaaacgcccctggccagatattactgaaacctcggtgaccgctcatatcatgggcttagtgggagacttcaggaggatcaaaggacacagaagagtaagaaactaatctgatatgtcgaagacttactccgtacatattgatgaccggcgaaccaatcccacgcctccttttcaaagtgctgcatactgcaggtcttagactcgttagccaatgccaatgcatgacttgaccaccaattggaccgggtggtccgttatgtccggtgcataactcctttccgcctcgtggtagggctcctgtaaggggtaaaagaacatttgagagatcccctgccggattgatgaatccaatattcaaataaataaatgctccacgctaggaagatataaatcagagcgtcgaaagcggagaataaagagacaggcggagacgtggcctgttcactctcggtgtcttcatatattggagcttattagtatgttccccaggtacggagtacgttgaatacaacgattgaaacatatgcagtcaatgctcaaatcagcgtacggtataagcatcacattgaaatgtttattcgccaagttcctagacaagtagaaaatcgaggagacttgaacagttagaccaaagatcaagatgctctagaaagacgccttggaggtatataataaatgcagtgaagtccaaagccaagggctcggtaatttaccattaccgtcacagtaccgtggtggatctgccacggttgccctttcctctactcctctgctcttcgcctttccacctttcctcccttctccatcttctactctctttaacttgccttgtttatcctgcgcaccgactgttcctattcctcccattcacgaattcatccccccagcgcattcccccaggcgctctcacggtcaattgaccgactggaatctcctcttgaggaccttcctactggatacatcaagcttctgtagctgagtacaattggctcggctttcggtgcgcaactcaatttcgaagtgcgcgtgcgcaattgtcctaccctctcatcccccgcaactttcttcatccgtcatctttcgatcaacacccatcctccgcctatctcggttttaatccaacagtaagttccatgcaaccatcatggcagcgttgatggtactgacttacgagtgcacagctccatgactatgaacccctatattagctgggcgatcttgctcgtcgtggcaggtagcctgggctggtactacaccaatggcacaacccccaaggccaacgtgattcgagctgccgtcgagaagaccgaggccactgtagcgcccaagaagtcaaagcgcaagtctaagcctgctcccgagccggctgccgccaaaaagtctgaggtgaagaccgtcatgtcgtcccccaccaccgaggatgacaaaccggacgaggaaatcgaccgcaaggagatggcccgtcgcatggctggcctgaagaccaacgctcctgctcagcccgctcccgccaagcccgctcccacgaagagtcagaagaagaacaagaagaaggctgcacacgccagcgacacccgtgcctcctcgaccactggcgctgaggctgacgacgatctatcttccgccgggtcgccccaggtgaacgccactgttccctcggccggatatgtttccgacatgctggaggcccccgcccccggtgcatctgtgctccgcgttactggcaatgtggagaaccagcctaagaagcagaaggttcagaccttcaaggaggtggagaccaagaagcagcgccagcagcgtctcaagaacgaggcccgcaagcaacaagttttggaggctgaagctgaacgcaagaagctgcttgagaagcagttgcacactgctcgcgagtcggagcgccgcgaggctgcccgatcatctacacccgctgccaacgcctggcagacccaggaaaacattgctccagtgaagaccaacggggtcaatggcggatcccgccccgctcccgccgctcctgccacttccgtctctcagggccttctggatacttttgagtcccctgctgctcctactaagtgggcacagaaccttccctctgaggaggagcagctgcgcctcttgggagctgccaaaggtgatgacgaatggaccactgtctctaagaagcagcccaagaagaagggcgccaagtccgacgagagtgtcagcgagaccagtgcctcggagaaccactccacccttgttgcccctgcccctattgagccgcgcgtgacggtgaccccaacctacctccccgacatcttgcgctcgcgcgagaagggccacccgctggactctgactgggctgcgtgagctgtttccttcatgaagtatttctctccgttctctcttcatcttgagctgtatttattacccttacttcgtctttgttttctcttttttggcgttctgggggtgtcacatcattcaagcaccctccctcccctcaacaatggggcctgggaggttgcgcaacgcattaggagcggaattggtagattcccttgcaagttgtgcaagaggaagaactgcactgcggcaacaaaagcagaattgcgggaatggatctgacgctgtgtttgtgcaagttcttttttttctttgttagtctagctggcaaaaatctgtattgcaatgaaatcataaccaatgcttgatctaaaacaaaataaggcgcaagaatgtagagcttcctccgatattcactatagagtccctgtgtcgtcactattcccaaaacggtttagcggccagttccggttatcgtggcctgaaggtgctttgtatacaactccttggtatttgctcctgtcttgaacttcttcttccccaacctgtgaggactcaactccaatttcttcttcttctcaatctctttttgtattattcttccgccatggcccaaattcgtggcactgcgggctataatctcggccaccagaacccgtttggcgggcccggcagcgcagatgccgccagcgatcctagtccactggacgcaatccgcgagcagacaagcaagatcgaggactggttggataccttggccgatccagtgaagccgtatgtttcaatcctactctttgttttggtcctatttctctacccgcgtcgtggttcaagtcgcgaaagagctcaaaacaagggattcaaggcatgcactgacaccctgttctttcgctctctagctaccttcccgctatcggccgattcctcatcgtagtgaccttcatcgaagactcgctgcgcatcctcacacaatggagcgatcagctcctttatctccgtgatttccggaagagtaagataatgcccctgcatcccggtccctgatcggcacgacttagggtccagggtcctgcataacatcgtctaacgcgcttttttcttctgctggctttagttccgtggggaatcacgcacacgttccttcttgttaatgtcatcgccatggccgtttgttcgttcctggtcatcgcccgcaaacgcaccgaggtcgccgtcgcgggattgctcgccgttgttgtcacacagggtcttggatacggtctcatcttcgacttgaacttcttccttcgcaatctgagtgttgtcggtggtctgcttatggtcctgtccgattcgtgggtgcgcaagaagttcgtccccgccggtctgccccagcttgatgaaaaggaccgcaagatgtatgtccagttcgctggtcgtgtgttgctgatcttcctcttcattgggtttgttttctctggcgattggagcttctggcgcattctggtcagcttgttcggttttgtcgcttgcgtcatggtcattgttggcttcaaggccaagtggagcgccatcattcttgtggtcttgctgagtctgttcaatgtgtttgtgaacaacttctggactgtacgtttactgggcgattgattctatctttggttactgatggtttcgtctagctgcatgcccaccacccgcaaaaggacttcgccaagtacgacttcttccagatcttgtcgattgtgtatgttgtctctccccaataggagatatgtccaacgctaacaatttctacagtggtggtttagtcctactcgtcaacatgggccccggccaattgagcatggacgagaaaaagaaggtctactagagcagaaggaggtcgaaacgcgattcccttctctctatatatctcccggcatctgcatcctagcaaacacaacaaagagggatagaaatcaacaaggggcggcctggctggtgctccgcgggctccgagcattcagatacgggcccttttcgacccttgactggtttgcagaggctatgcatggctgggttgggcgttgtttgcatttgggatgattttgaaacgccgaggagatccaacgatctactcgttattgcgtcttttcttttttgggttgttctaccccgcgcttttgtgtcctggtctcttctttcattgagatcgaaaacaatgtcctttgcatatgatgtttttgatgtgcatttgaattgcatctatcacgaagacaaactgaatggaaaatctaacgctgattgcgacgcatatctgtattgtcctttgcttaagactcaataatagtagcaatggctacgtctaatagaaggcatctagtaatattgagccgacttctgtccctctttatatatgtctctcttgttgaccattgtcaaaacccctatatgttcctgtgcagaattttacttgctgaggaagtcggactctgatgtatcattctgtatataaaatctacaatctagacatatgttgctcatatttggttttataatacggatatttggacggcccagatctaaatctagatgaggggcagcagcttctagagatcttgtataagaaccaccgagtttcaagaaacattcaactatatttacactaacatagtattcatctcgccgattaaatgtctaaaaagagaaaaacattcattgctggtcaaacgctatgtactggtggtaaccctaacagagagggagtgattatggtacaaggaagagataacatctaggaactaaagcaaagctgaaaagatagaaaagagaattccgcagggccacaaagtgagggagataaaggagagacaaggaaaaggattgtgaaatgataggaaggagtgctgtcatgatgaactcgcccgttctcttacggctgtaatgaaacaacgctgtgagggaacagcagaggaacttttgcaggatggaggtgcatttcgcttttatataccggaccagccaggtacattcctatgagggatctgagtccgacagcgagaggatgagtgtttgctccggtgttttctccgaggcagatttggcaaacacggaaggagtcttggaaaacgaggtgaaataaaggacaaacaaggacaaaaaatgactaaaaagcagatgctcactgggcttgatatgcttcaaacgccgtattgctaaacccggagaagctgatgcgaggggagatatggcgttgctgagggatgagtgttgtggaattcgcgttcgactttagatgtccatgctccaacgccaggggcggataggctgcaattgacccagaccaacatcatcgcggctgtcgtcgttgatctctaggtgtagcatgtggaccttcttgttgtcccggtggactgtggagagagtcttcgagatatgtgggcggtaggtcttatcttcatctgtggctttcgattgagggcgagatgcaggggtgtcagggtatttccattcgaagcttggagagtcatccgagagggtcgtggagaacatagagtcagttcgagagtgtaaatctgcgtctggaacattggagtcgatacggagtcgagtcaacgacggtcgacgttgttgatggtgctgggtggtgtcatcgacagctccgtcgccagactcgctgttgattcgttcagtttcgttctccctggccacattcttgggaggccgggatatgttaccacaggcactaccacgagtcggcgaagtgacgtcggctttaccagccatcactcgggcactcggtggtggctggagcatccatctggtctcggcacggctacacggtccactaacaatgggcgggtggaggtcgttcacaggcggcacgcgggcgatgtagtacttggaggtttcgttcgggtctgcacgaccgcgtccagagaatccaatggacgatccacgcacttcctgttgtccccaaagaggctcatcttcgcgttggtagcgcattgatttccacttctcgccgagtggatgcatcaggccagcactcttgtctttcttgagttgcgagctctggtcggtagtgcaactgtccgttcgttgaacagggcggtgaccaccccgacgagctggaggaccagggccgagggcgatttcttcccgccagcctacattggtactgaacggggttggttgtgggaatggacgaggttggtcggtgattaattcgttgttgcgtcgctccttctccttttcccgctgcacccgggtagcatcatttctacgtttccgacgatcgaggttctcggcgcagggggtgcaagtggcataatagaagaccgcggactgagcgccccgatagagccacatggctggcgcggggggggtgagtggggaagatcggtttattggggcttgttttgtggctaagagtgcaccgtcgtggacgacgggctatcagcccgtgaaatctgttgggattgacgcggtattcgctcgttgtgttgtagtgatactatcggacacatgaagggctgagcggataggggggaaactgcggaaaggggcgggatggcaaggtaaacgtatgaattggagatcgcccagcgatctgtaggctcaagagagggtaaaaaatagttgggagagagggggagagagaagagagaagtgagatgaaatgacaattaggggaggtttctgagggggcgtcgttagtttctgcctggggtgtttcgctttgagttgatattttttttcactgtttgcggcctaacctgggtattccacgttcatatatgtcaagatatatagacaattacaattcaccgacttcttctaaatcttcaaacaagttacaccctgcagtatacacctcacattgtcacaaatagcctcctaacttgctgcgccaaggccgacagggggctgaggaccgaggcgtatggggtactagataattatagagatcgaattgaactacggagtaccctgtccggagcatacaatctataacatcactgcctagttctttatctctctctctctttgtgatccttttctttcttgctacgaggatacatatgtactccgttgactccacaccgtatgagaccttggcatcttcccgcgtggagtcgagcaggaatgtggctgcaaacggtagattactcctttttgtagagaatgcagaagattggaatggtaattcagtagattcacattcttctggaccgtaggggcctacatctcatacttgaaagaggccaagtagtcgcatccccgtaaattcattgtctgtgccatcgtctgtgctctgggccccccgcaaaagtcattcgaggggcaacaatgccgagttgatggtctcatatgtagccattgcatcattgcacatcagagtcggatatgtcaatgaaatcacaacccgtgaaagatcgctgtaggttcgcagtaaataatcaatagatcgacattcaacagcgtatccatcgtggtaggccaagaagcccgcgatggcgaattcaatagtaaagagccacacgcaacgctggcaaactccaagattcttcagcttgctgaatcgttgtatcgcatgcaaatggtttccttaaaacgcccgaaaactgatggaaaatagcaccgtgtatgttgtaagcccccgctcatgcattcttcgtgcctcggattacttcgcctttcaccttagaccagtcgatctcgctgtccattttctcgtctatttcaccacacaccacgacattgtcaccgcggatcaggtacagcccatgctcaatctctgtggagggctcctcgtcgtcgggagtgcggatgatgcgttcaacggtattggccaggacaagattggtcgcttgatcggttgacaggagatcgccgatgagtgtgcggccgtcaacggtgaggatcaggactttttctgttcgatcgagagtggtcagcagttaacttctataggaaatggcgtatgtaggcactctagctaatgtagaactcactattgacgtaaaaatggagagacatgttggatgggagagcggttcaaaaaggtgaaagggtatctcaagtttgcggttgatcgggtctaggtagatgcaccgctgaaagatgtatctcgagcccgctgatgttcctgtcgctgggcctggagtagctctcttgctttgcgtgggctggaggaggttcgtgggatcttgtcacttcgcgcaaaaagtgctcgtcgaggtgaagagccggattgatcgcggttggttgtagcgcgacaattttgacttgccgaggatcctcaagctcgcggacggaagattcaatctgcaggagctccgtttaaagctcgaggccaatcaaatgggagttgatgataatggcgcagagcgggtctgtactgttggtcgaatcgcaagtaagattgccagaatcctagatgataacaataaaattctagaaacacgagagtcgatgacctcgactgatagcaaagagattggtggcagcacgtgtcttggggcttcatggttgttttccaggattgtcgattgacatccccgattcaatcacgtgcagaagcttgtaggagagtggataccacaacattttatactgttttatgagagatcaacgcgtttaaggtggaaaacatgggctttgttgtacaactgagctacacaatgagctacatagatgactctagtgtaaaaggatttatgtatagcaattcactatgtgtgcacgatatcgcccgcaatttcccatgcactccaatcagcctcgcaaagcactcagatccaaaggaacactgctgccccgtccagcgcggtatcggcggtctccaccgataaagtgccgtggtttggggagtagcccttcagtttggaatttgaatcgcgggtcttctattcggactgggccatgtccttgtgttgaaggactttgtgcgcctactgcaggcgatccaccattggaaagtgtatacgcgctagggtccagcgatgcaaatggttcgtgggagacagggcgagaggaagcaggggatggtcgggatggcggctcgcttggcggagctgcaggaagtgaaattggaggcggtgggggtggagcacctggggcagctgatgggggtggtgggggaggtgccgagggcgaagaatgtcccagggcagaacgtgcagcctgcgcagcaatcgagggggctattgaggggggaggaggaggtgtcgatctagaagcagccggcgggggaggaggtgcccgacccgcgggggctgatgggggtggtggcggaggtccggacggttttctcgatgtaggcggtggtggaagcttgcctggtgctggaggtggaggaggcgcgcgtggtggcggcgcttcaggggcccttgtagctggcgctgaaactgtagatgatgatcgtgaagcaggccttgggggaggcttcttcaagccggcaatcaaaggattgatcggtggcgcaggcggtacatcggtcgatgatggacggggaggcggtctgactccaggaggccggggagctgttggaggcttgggggctggcgcagcaggtggtcgatgtgccccttcggaatcggagatatatggcgagtcacgattggcacctgtatcgatacctccacgactccgtagcttgggcattccaccagcaaataaacctcctaattgaggtggcgttggactggatgcaccatctgtccccgaaaccccttcgctgttacttcgtaatcgattcgcggctggaccggatggtacgggcggtgcaagcccgcttggaggcggccttgcgccaggaacaggtggcgcacctgcgactgggggagctgctgagacgcctcctgaactgccgattacaggggctgatcgatcattggtaacagccttcctcagcctggcgcccttgtgaatatcagaaagaagtgcgccctatctataggttagctgccaagttccttaagcgacaagctgcttgcggtaatgaaactgaagcacccagtttacctacccgatctttagcctgtcctttgggaggcctgcctgggaggccacctggagggggcggcgggggaggaccgcccaaacctcccggcggcggcggtggcggcgggggaggaggaggtggcatagttggggatcagataatgagagtatcagatagacagtttcatataatttagaaaataatcaggtcaggaagatgtgttcctggaataggaggaacatgacagagaagtaagaagacgtcagggtgcgagtacggggaagtggacagcgtcggggcgaagtctccgcctggactctcccatcgaaaaaaatacggctgcctcacaacgtcactcatcaccacagccatgaaaagagttgttctaacagccaataagggctcccagccacagggctcgatctgtcaattatgtcagttctcgacttcaacgccccgtcgtggcctccctatcgcgcgtctccccaccgctcgcgcaagtcgagctgcgacctccaatctccgtttacaaccctcgaatcgaaccgataggttgatactcggctctccttcgcttattttccgtcgatatgcttccgctgcgaccattaggataagcccagaggatgcaatcaaagagattgcgcaggatgcattggccgtacatcaatcaaacgcggcggcctccaacgaggtggtgatagaattgctacaaagatgccagctggtcgccaaatcccttgtcttacaggaacgggatcaaatcgagggatcatcaaagggtgagggcaacgcggtctcttctttactagacctggaggagaagcaacctgcgccgaagaacaaaggcaaaccacactccttacaacatccggacccccgactggcaaattcagtcgcaaaaatcgccgttgacctcttgaaggacgagaaggtcttcatttcgcccgaagctctggcctcctgcaccgagaccctgactctactgcgacgggccgagcacttccccgagctcttccacctttatgcctacaagcctgtcccagaagagggtagctctccggtgaagttgctgaaagccaatcccaagagtgtcaacagcgccgttccggcggagctggctaacatggctcttggggttgccattgcacagaaaaatctctcgctcgtgctggccatcatcgataatactttctgcgcccccgccttccaccgtgcgaagatcttcaagaaagccggcgtcccgctggctggccttgcggctgccccggctgcttgctatgctctcgcatcgtgggccgcaacattccagaacacaatggatccgagcgtagcgactgggattgcgtttgccgcttcactggcttacgttggcggtgcatcctccatgggctttttggctattaccacggctaacgatcagatggaacgtgtggtctggattcctggtatcccactgcggcaacggtggttgcgcgaggaagagcgcgctgctatggatagagttgctgttgcatggggttttaaggatccttatatgagaggcgaggaagttggtgaagagtgggaaagtcttcgtgagttcattggcatgcggggcatggttctggataagaccgaattgatggaaggcatggagtaacttgattccctgcatgtgtatcataagagtctcttgtttcacacataatgagcaatgtaacatacaaacctaagctttatctacagctacattatactggtaagattacgatagaatagcagattgagaccgatcatgagcttcatatttttttaaagtcgtgagactatgagataaacccaatactcaggcccaaactagaaaacaccggcgcagttaagcgacagataatctagtagacacggtggggaggggacatggaagccttgatgacaagactgccaacgttctgccagcccttcttgaggagggagacgaggtagttgatggcgagcatgaggttggcaacgagggcctccttctccatctcgacgttgccgatggcaacaccgaggcacagaaccttcttgagctggaacttgatggtggagcggacgtcggtgaccttgacggccatgtcctcagcggcggagacgggggtagggaacttgccggccttggacagaccgggaccgaggagacggggaatctgcttgatcagaccctcggaagcaaggaaagcatcgtacttgcgagcaagcttcttgatgagcttcttgttcttgttgagcttcttgagatcgtcaacggacatggcatcgataccgtggtgcttggcacggtcaagatcgtgctgatcaccaagaacactatagattccgtccgttagcttctatgttctttcgaggtgtatacatccttcgccgccgcgcatcgtgggatgtgaaagattgccccgcgggacgagttgtcgatgggaaacgcaccagatggccatgttggggcggggaacgctgggcagcttgatggtgccagagaaacgcttatcacgctggggatcgtagttcttcaggccgatctgaagctcaacggtctcgttgaagttacgcttcttctcattgagagagtagttgagaaggttctcgacattctggcgcactccggctgtaatgagaagagcagttagtggcaagatcaagtagagaatatcatggggtaagtcgtaccgactgtgatcttggacatgattgctacagtcttccaaaagaagttaaaattctgttggtatggctctgcgctgaatgcttgagaaaagaaattgtcgagggccgtgaatttctccgcttgtgggtgtggacttgcgctagtctagattaggattagcggtgccctagatttttgtttgctgactcatcaaacagcctgaggcatgaatacgaaccgatttccccaacctcggcaagacctacgctgtatgacggccacggatacttcactcaatgcaattccactcgctcatactccgtacaaataatcgcattagcaagcgtcgactcggcttgtataaaaaataatatcgagaatcctaatccctcttcgtattgctcggtcaggtcaacattgctgctgtttcaagtaaccgccggccttgcctagtacgcttttcctgttactgcatttggcaaaacttccaatattagaccaggtgaggactagttagtgcaaataatggaacatcgatcttgcttgtcaataatatgtcgggcacacacgaaacgaaagcatacgaagaggtctggacggatactaaattggtgattccctcggagaattgggattaaagtgataaattgcccagataagaagcacgcaaacttatatttcaaggttcaaagctatatacgattcatgtaggtatgtccattgtattttatagaacgtacggcatactcaggtagaagcatcgaccgggtcgccccgccacatagccgacccgcttatatcgatagatcattactttattatttatcctatttcattgttcaagaaagtgtctcgttaattgatatttctttgtgcagcgatagcagtaagggcttggatcggatatgtttataaataccttgttttcgcatatccccgaagatcgatctagatcaaccacaagcacgagtccgtattaagcaggcacaaagtagtccagctgagtagatacatcattttaacaggcggtggtatctgatattaattatcaaatacgtatacaccacctaaaaagatcttcaagactcctcgtcatcggcatcttctgaccacaaacaatatatatcgaatagtccagatgaccgaccaacacacaagcttttgctaagcagacgggtatataatacagcaacccacaaaacgagcaaataggatgctagatcatctattttaggacagttctcaactggtgaaacgaacttgacatggtctgcgggggctgcatctgatcgcagcgcttaaacgtgaccggcggcagtgtcagcctcaggactggtcacccaacccccctttggcgtcgagggctattgccttgtgtttcgatttaatttagacattcccagtgagattagaatacttaaacttgactttctgctaattccttttgtgatatactccaggtttacattctatggtcaaggttgtttacacctgggcatgacttggcttgacttaatccgagataccccctcctgacttggcagctgatcttttgaccattggctattgattttttttttggcttatttacagaccaccttgtttggctttatcatgtcttctacaacagattcgcgcgagtcaactgcaccgcaggattactactcaagtcttgacgatgagggcccgcttgtggaaaagttcaagaacatcgacgataagacgcagttttaccttgctatgcgccgtctacaggaccctcttactcagaatttcgtgctcgatttcgggaacgatgaggcatggtgtgcgtctgatctggacactaacgaattgaaacggttgctgagcaagccggtaagtctttttcgaagattagacttgagtctatccaacagtaaagggctgacatgatacagagagacaagtgctttggtacacggtggatgtaagaatgaagtcaaatgtagacgagtatatactgacattgtgatcacagcaatatatgggcaccagaggagcagaaggaaagcataagggtatgttcaatttcattcgcatatgagcagtattgactgaccatggattcctaggcgattaccaaatactatggagtgtcagaacggctacaggggatgatgtgcacagagccagtggatcctgcacccaaaactacacctgtaccaaacaaaaggacttcgaaatcgcctattattgagccgtcgttcgagcacgaagtggatgacccggagaatgcactcaagcatctcgccgatccagataaatcgcgcgagtcggcgtcattctcgaatctcaccttcgcacaagtcacgaatcaaatctggcacttctcttctgtggatcatggtcctcgatgtaagtacatcgcaccaaacccgagtgagcataaacattaagaatctgttagacacatgtatcggctataatacgttgtatgtgattcccacactatcacaaccgaatggccaagatctcccggatggaaaacggctttggacctggctgatccagtgcgatgatggtgagcatcccatttttcggatctcgagtgcagccgctaacttgtttgcaggcacaataatttcaatccaagagaaccccttcccgagacggaaggcagtgccaatagatgaagccaagccagtcctcgacatcgtgcgcaggaacatccgctttattttcgctggcgtttcgagacagcactttgccatgtccgagagcgagtcgctgattaccatccgagtgcgacattttagtgacctcggaccggatcaggccaatatcaagcagaaggatggaccgagtttgctcttctactatatcttcgatgactgggtgtcaagttatggacttatcgcaaagcgagaacacaaatatggggttgctttggagaaattggtcagtagtgtcgggaaagcacggttgtgttaatgtgttccgatggctaaccccgcgcagagaggccaaatgctcgatcgtccggttgtagatttggtaaacgaattgcactggctgggccgacgactcgcagttctcaaacgattgtaccagagctatgagcttatcatgcggcgactcttgcaacggcaacgcatgctccgcgacgaagcgcgttcgtctcaaccagccccggtttcgtatggagccacctttagcgacatggagtatgtagatatgcgccagtcgagtgtcgtgagcgatttcactttccatgatacaactgataaatcggtcggtgtgcagctgagctcgacggccgtggcgcgtttcgaacggttggttgatcggatcaatctgtactgtttgagcgagattgagaactgtctgaatgagaaagagtctttgacgttcttggtgagtatcttcccgtgctttattccgagaactctgctgacgtggcctagaatttcaacttaattgcgctcaaagactcgcaggctgttgaaaagctcactcggatcactattctgctggctaaggcgaccattttgttcctgccggtcagcttgatgagtgcgtacttttcgacggaactcgttggagtcaagaatgggtacaccaaggcggattactgggtcagtttcgtggtgatcttccttgtaaccatcttgctcttgaccgttttcggttacgccagcgatactgtcgaaggcaggacgatctaccggtccatgatacgaacattcttccgacggtctcgccagagaatgtcgcgacgatcagaagaataagagaaattggctatgacggcatgaagaaccgagagatggggtggaagaaattacgcaggcacgataagtgtgggaaggtcgggcctatcactcggcctatcagacacggtgggaccttttcctgagggtcttagcccgggggaactccctttggtatttcatttacggggccaacacggtgtcctctttctaggaaaatataccttcccgaatctatagctagttataggcagaactattagagtcataccatatatagtcgaccgaatctaaatcataagttgccttcttcatatatctctcagcctcattttctcgacgttgcgtgctctccagcaaaacgggtgacaaagactacgcccaccgccgtcggtctgcgtatttccacgtattcaaaacaaaaacgaaacaaatttcacccttctgacttctcttcgataattcccctgaacttgcatctcttgagactccttaaacaacatttatactcttttctgccggtaagtggttgatccggttttgactggctcgtgcccagacttaccccccttcccccctggatctctgaccgacaagtccacaacacgttttccaacccctccgcttctcccctttcaactacatccctcgatatatctctgacctatccactcctcccaggatccgagggttttctcgctaccgacaatatgggtattactttctcgcggttgttcgaccgactatggggccgcaaggagatgcgcatcctgatggtcggtcttgacgccgctggtaagaccaccatcctgtacaagctcaagctcggtgaaatcgtcaccaccattcccacgattggttagtccgcccctcgacccatctatcggcgacaccgtgatgcgctcttcgcaatttataagccgtataagagacattcaaaacccccccggaaactgatgcctagtgcaggattcaacgtcgagacggtcgaatacaagaacattcagttcaccgtgtgggatgtcggtggtcaagataagattcgtcctctgtggcgccactacttccagaacacccagggtattatcttcgtggttgacagcaacgatcgcgatcgtgttgttgaggcccgtgaggagttgcagcgcatgttgaacgaggacgagctccgtgatgctctcctcctggtgttcgccaacaagcaggatttgccggtaaggacttggattgttggaggatgtttgctagatgaaatggcatgctgacctcccccgcttttttttctagaacgctatgagccctgccgagatcacgcagcagcttggtcttcagagccttactcgccgtgcttgggtaagtgtcgtcccccgatttctatgttgtttacaaattcactaaccgtcctagttcatccaatccacctgcgccaccactggtgacggtctgtacgagggtctggagtggctcgctgatgcgctccggaaaaccaaccgcgattaaggtctataatgcgaattcgaatcggacgtgtagctgggtgaaggagaataccgatatctgcgaatgatggattgatgatgacgatggcggggagttctttggccatacatgacattgatctctgcaaggaaaggttctgcaactggttcgctacttcttttgatgttctctcttcaaacggctctttttcctctacgctatgctattagcctcatttgtttttcttctctccggcgtcgccactccaaaattacttctctgccttggaaccccagagatctgtataagttctcaaattgtaaaatctcagaatctcgattgggcaaggagagtgtgagagaacacaagaggaacaaatgagcaaatttcgaagtttcatctgctttctgctttcttatcttggcttgaggcctgtagggctcagtcggactgagtaaatttcagtccgggctcaggtaccatcacgtgatggattcacaagggtctgacagtcattccaatgttgtttttgttcaattcttatgctaaagtatggtaaagaagtttctactttgcttatgtctagccatggactttaagattatgtgggacaaaatatacatcagtaggatccacatagttagggcttatgtggacatatggagtccccggatctataggacaaaatgcgtataactgcgtgaacgaatgcttcaaacatacacagctctgactgccaaagacattttacaaacgctcagtgtctgcaggttcctggtatgaccagagtttcgtgaacaactctttctcttcgtcatctttagccaatccgatgaagatgtctttgaatttccggctattcttctgggctgtatcgtagtctttgggcagtaccatgccatccaccggaagcacagatccatctcgaaatattttcagtaacttcccgacaccatttatattctcctcttccttggaatgaagctcgacatcctgattggtgaaactgatcggacatggtacagccgggacgagtttttcccactgagcgaagagcgacgtgagtgactcgcgaacaaaaaaaagatcgcaattttcccacactcccgtgaccagccaaactggtttccggatgatggggatctttttattttgaaggacagaccagtaacgaggcgatagtctatacaccttggctaggtagtacttgtgaaggatctgactctctagatcgtcatcgatcttgcgttgttcttctgcacttaggctgccaaagtcttccggtctttcgggcacgacccagccttcttgaagaggcccacggtgggcacacatccttgggacatcggcatggtagaacaacggtgcaacacacgctgattgccaatccacgatacatgtaatttggagggtctttggatcgacgaagatgttatctagattaagatcggggtgcattagaacgtttttgacgccgcgtcgttggatgctgtttcgttggtagattgaagaataagatagggagcaactttcatatatttggtcaaaagagcaagaccgtcctcgggatgttcctggcttttgagtgaccgataatagttcatccgaggaattgcatgtgacttcatatacgcaatctcgttgcgccccaatgaacgagtgtagtcactgggatgcttccctatattagaaagacgaccagaagcttttcaccagcctgtcgattctcttgacttacatggaccacgatccaaatccatgccactccgtaccccgttccacaattcgccagtagtgagaggtcccatggcaaaaatatcaagggtgctggtcgtagcagactgaatgttggcttctttaggttcctcgcctagggagcgaagatcatccttgaagtaaatacagccgtgcatatcaaaagtcacaccagtcagagtgttctgaatgtcaatcatctggatgatcaattggagctttggatctcgagaccattgattccaaacagagcctagacaaacaccgggcgctttttcttcaataatatactcggccccgacatgattatttgcgtcaaaggacgatgctaggactcgaggaacagggagcttcaagacgtcggaaagctatgtaaattgaattgtaagattggatatagcaaaaatgaccggcagaattacttactaacttgcgtgtagcgatctcggaagtaattgtgaaccgagcagccccggtgttaggatttgggagctttgccaaaacttcgcaaccgttgtccattgtcaggataaatgccttgttgtgtaggccttctgcacattttgtgactttggtacctaatgaaactagcgtattattacattgcaaagtcctaaggacagcaacgcacaagattgagctccctcgcaaacactaatggcaacttgaacaagttgctgtaggtcaaactccacataacgtttagagagttctttttcttagttgaaccttgaaattcgagccaagttaaaattcattttcctaaagaaaatgaactgcgtagcttacagccaccggtgtctggtgtatcggtgcagatcttcctcagaaatcctctggtctggaggagagataatcaacaattcagggcagatcacagtgtattttgaatataattaccttgaccatgctgtgtctcagcatagagctcaggagagcagtgtcgtctgcctagacgagacgtggtgaataagctcatattctgagctcgggagcaaggaaaggcacgtgctcgtacacgtgtattacttttccaattgatccaacgaattctggaaataattcgcattgtcatcttgtagaataaccccggcgagtgtcatatcaaggtgcgatggggacttggaagggggttaaatttgagcacgtgctgacatgcctagtgagcctcatacaaatccgatataccaaaccttggaaggttacggagactcacaaccttattttgactgtgcgaggtagttctttccatttatttcgcgtgccttccaaatttcgattcttactttctatcgcatgcagatctattcaatcaatggaattacccacttcgtcacggccaaggaaccacgtttgctcgtgctttatgcggagtcgagacctgttttaccgtggccaaaaccttcttacagacacttcggctgtcctacgtagctggtaagtgtttgtgcaacatgccaagctgcagagtctatgatcgaacagtcgcgcatacgtggccagcgagcaaattatcctcgaagcccaccggattccgacctacaaagtttgccgaagctaacgagtatagtggcgtctatcgatcacacgaagctagtgcgggtctacatacatttcctcatccctctagttccatacaaaatgcagtctaagctctacgagctcaagtgggacctaaaaaagccataacaaatgggactatcgatcccatcgtcttagcttcaacgtatacgtatactttcgtggacattcctccgtttactggcaacaagctatgcaaagaactatgtcctagctcatgtgaagaagtgagacggggttgatgagtgctgtggtgcaactaagtctagggctggtcatgggttgaccatggaggtttaagtattttgcaggatgttacgtatcaaagagctctctagcactggagtatagagctatggatatgttcaatttcatcaactacacaagaattgtcgccggcagcctcgtgtcttttcggtagtcttcacagatattgtttttttcccccccaaatccagctaggtaagtatatgcgtacaagacccataaaaaggcccattaaatacacctagaaaccaaaatagatttaaaagaaacaagacgcaatctccagggctgatccgctcgggcttggaccagtccattttgaggacacaactgcgtaatccctcatttcttggacagcgccaacagtcttggcacttttaactgcagaaattaccgacttgggcccttggggctgcttatcttctgtttcgcatttgaatatcgtctagttctaggcagtttcgtctgttttttattgttttactgtcttcacctccttttagctcttttatctcttaagagcgactccggaccaagccccattgcctggccgacgatcaacaacaacacagctcatcgcgtgcctctccctccgtccaacaaccacccctgatttgggcaatatcgaacagatttttctatcgttacacttgttagatagatgggctggtaatcgtgtgattttggacaattaactacctcactcattcaatgttgacatattgtctggcatcatgactgttcaggcgaggagggcctccgcagcttacaaggccccatcaccatataatccacgagatacagacatcgaaaagcaacccgccaccgggcgccacacctatcaccaccaccaaagcgatgaccccgatactgaagacgagttgctggacgataacaatgtcgcggaatcctacccgccgcccatcgtagctggcggcagtcttcgccgcccccaagctagcgttggctttcgcgtaccccagcggatcatgcgctggctctgcttcgctcttttcgccgccctcgtcgtcttcatcctcaccctcttccgctttaccatctcctcctccgtctcacaagtcgccgtcgacctgcccacggtcggcgccccgaagccgccactatgggagacctttccgttcctcactcgctacgagggtggtatctcttccttggttccgcgctctgaaaatatacccgagtaccctggcgatggctccgaggacctgggtttgcggacggacagcgacgagcagaaggcgcaggcgcaggagcaggatgccaacaaggtgaccaagagggatatgagcccgaacatgttgagtaatgtgttcaatccttatcctgactaccaatcgccggaatacatagaaaaacatggcgagaagcgcgagtgcttcctcaatgcggaaaacacgctacggattccgtctatccaaagctaccccggaattccaaagggctttccagatccagcgataggttcgagcgagatactgggtattcgggacgacatgtgctttgatcgatttggccgattgggtccatacgggttaggatacggggctaagaaaggcggcatcggcgcgggcatggagggccaccgtgagggtgccgaccgcgtgtgggaggatgtcccgccggtcgatttccgacaagtggattgggctgctgcgcaacaccgttgtcacgcggctaatcgccatcgctttaacgagctgccggagccgcgtctcaaccgctttgtttctatgcctgtaggtattcctaaggtgaacatcccgccgcctgtggaagacagccgcaatgaaccgcccaaggttggacctgagcgtctgccgcgcactgcagtggttatccgcacatggcacgactttcactataccccagaggacattatgtacatgcgctccatcatctcagagctctcgcttctgtctggtggcgagtatactgttcacttcttggttcatgtcaaggatacccttttgcagatctggtccgatgacgagacatatcagcgtgtgcttgatgaagcactaccagaggagttccgcggcatggggactctctggtccgagccacagatggccctgatgtatgccggattggaggagaccatgactcgcggtctgccaatccacggtgtataccgcagcacgtacatgcctatgcagtacttcgctttccagcatcctgagtacgactacttctggaattgggagatggatgcgcgttacacgggccattggtaccacctcttcgacaaggtcggcgaatgggcgaaaaagcagccacgaaagggtctgtgggaacgcaatgctcgcttctatgttccgtccgtccacggctcctgggaagacttccggcagatggtccgcgtgcagaccgaaagcggtacaaactccgccaacaacatgtggagcgccgtcaagggcaacacgcggagtgcaatgcaccaacagggcgacaagtccatctggggccctgagcgccccgatgaacaggatatcttcgaggttgagggtgagggtatcccgcctacgagcatggataaggaccagtaccaatggggcgtgggtgaggaggctgacctagtcgtgttcaatccgctctacgaccccgagggcacgacctggctgctgcgcgacgacgtgacaggctacgacaaggagaatggcatgccaccgcggcgcaccgcaatcatcaccgcgtcgcgaatctcccgcaaactgctcatcaccatgcaccgcgaatgcagcctcaagcgccacagcatgttctcggaaatgtggcccgccaccaccgcacttcaccacggcttcaaggctgtcttcgtcccgcacgccgtctacgtcgaccgccgctggccgacccgctacctggattcagtgttcaatgccggtcgcaacggagcttccggcggtgctcgtacgtctatcttcggcgatcgcgaacacaacttccgtgggacgacctggttctactcagcgggcttctcgccgaacatctggcgccgctggcttggccttcgcgtcgacaatgacggcggtgaacagcaagagctggctggcgagggccgcatgtgtctgcctcctatgctgctacaccccgtcaaagaagtcaatattatcattgacgacggagagaaagtagaggaccagtgaagaaggagggagtatatatttctctcagaattggcttcgattcgtttcttgggtgtccctcacaccctctcttcctgccatctccaggattcatgcacgctttggggtagatgcttatttgtcttgcattggttctcataattactgtataatgacccttcattccccggtggcataacgtccccacgttttggattcccgtttctcaatttcggtgcgaaaaaggcgttcgcatggcctggatggccgggctatggctcacgatgcattctggattttcccttggtgcttgaccacttggtctagtcattagaggtgctagattgcgttctgcatcgggagaattttgtttttgcttgacctggactggatatttcagaaggacgagacggacttcttccagcgagggctattttggttacgaattgtttcttgcacataatttatatttttggttttatgatttattcgagtagaacatgggatgtcgctagagatacaaatatgcctatatacaatgcaattataacttcaacccactacttctactggtcaaccctggtcggcacaaagcaaatattacactcataaaccccatcctcgtcaaccccatatgtaagacaagtccgacacacccgatgcccacactcggtaaccaaaatctccaccctctccccgtcctcaacacaagcatgacagaaatgcgtcggaaacctaagcggcggattctgaaccatacgccgctcaatctcggaagcgagttcctttcccttctcgacgcgcgcacggaggagcgcggcttttgtgcgcagtttgttcatggtagatttgttgaaggggttatcggcttcttcttctgacgtcgtcgggcttgtgttgggcttgtgcagggtcggaaatggttcggggacgatcaggggtcggaagcgttcgcatatgggtctgtctcgcatgcaatttcgttcgaggtgatagcggcggaggatttgccggttaaggaggattgtatagaatactatgaacgtttgccaggcgcgccattcggagactgggtccaaagggagggggaggagggttgagactttgctgggggttgttgtcttgaggcgttgggtttgggtttgagttgaagacatgttgaagttgattataatatgtttttttttccttctgtagttgagagggggtttatagcgaatagatcgaagtattggcttcacaagcctagcttgggctcttttgcagagagatgggagaatgtagaaaattcgccggccacgagacccggcatatcaatagagattatatcgatctatccaccccagaaccaaatatgcctctatctacatagcactgattggctatatcatgactcctgtgtcttctcgtccaagcaattctagattcggtgcataaagcattatgtccaggtataccatggatgtagctgagcgcgaaacgcggattctttttccctggcctgcgatatcggcagacattagcgtagacaaccggttccttgaggtgtaaaacaggttgagtctagatgctgtcaggttcaatatttgccattgaagtggcggaaaaatatcaattgggaagtgacgattgcattggtctagaactatcgagtctctgggtttgttgatattgaatttcttctatgttgtcgtgtttcgcattattttgatttctttcatacataccaaagggataagagagcaaagagaagagaaaaagggataattctaaaggtagatgctgtctcaacatgaaatatttccaactctgttccagagtctccagttttttttatccactctgcgatctcgatgcttttcttcagcatcacctccatctgcccgctcttgtatgcagcacaggtccatcctcagtctcttgtgtaggaatgggatgttaactccctattctctgctcttcttacacccttatcctccaaattgcccacctcgacgcattcccaggatatgaccgaaacccccctgaaatgaaaggtatacaaatactcgaccccagaacccgaatcgatactcttggcggatatcacgtattccccaggaatagacaccccctctttcctctgccgacagagcggcgtcaactcccagacccggacaagtcgatccgctgacagcctatccgctaaggccgaccatatctcaattcgggaagtggcaatatcaaatcccacttcagccaagcgcatgatgaaccgcacattgtcttgcccagagtgttcccctccagtcgggccatgtgtctctacacagacatactccctatcatatgccgggctagtcggataccgcgggtaaaagcctagagtcccaaaagatgcttcatgtccattagcacctgatgtatgagaggacttccaagtcccatgcagagcacgaaaaatagccgaggctgcagccttctgtgcggcctcatgaccagggagaagagcgtcgcgcaaagcacctagtgtcctatccgcctcgctctctgtacctggagttggggtattgccataaagatacctcgcaggaacaacaggtccagaccggccgtcgcctgcttctagtgccgagcgactaatctctagatccttcgcgaacgactccatcaatccgacgtagtcgcccatggggaactgaccacgggctagatccgggtgtgccgatctgagacgccgaaggttttgcttctggtcgtctgttttgcagagcgcaccgttattctcctcactccataatttcccaaggaacctcgcttgcatctccatcacgccccagtacgggccgcggtagaatccgacgaatccggcatcgggaatctccgagcggacggtgcctcccttgtcgagaatcaacggtgagaaggggtccgtcttgcagtattcaagcgtcatcaacacttcatccggtagcaatgatagggacttgtatggcgtgaacccggtggccatgactatcaccgccacattgtctatcgtcttggtcttcccgtcgggcccttcatactgaactgaggtttgcttaatatctggatcagaaatcacagcagtcacccggcccatcgatgtctgaatcgctccacacctgacgaattcggcgtaatcattacctatggcgacccatggtggctgggttctggattcctcggcaccatgtggtgcatccatgtgcgcgtatttctcataatcactgccgagcaaggtgtggaagtaactgtttgttttgactgctttttcttctggaatgggtccgaggatgtagtctattggacccgggggtcggcggcctaggtcgtacatggccaagtctaacggtaagaaagatggactcccatcgggagactcgtgtgggagatacgtcggcaaagcccagaacggtcttgaatgtatatgatgcacttttgtctcttgtgtatgtgggactctgtttgtggaaggtgtagatgaagattgccggagagccacagcagatgcagcttcgacgcctgacatgctgccgccgatgacgacgatctggcccttcacatcgttggattcattagagagcgcctgctctcgttcataatggagcgaagagctatggatgattcggccttggaattgatctaggcctggtatgtttggaatatactgctgggcaaagtatccagaggcgatgacaatcacgtcgaaatcttcagaagatatcccatccagtaacccaggagtttcctccgcgctatatagtcagcatccagctcgagtacagcgacacgcgagtgagcaccaacatacctttcctgaacccactgaacattccacttcgggtcacctccacccccaaccctccgtatagttcttatcactctacaccctagcctcaggacatgagctggaacataccgctctgcataacaggccaggtattctccaacctgtctcgcctgaggaaaaatcggaatatccgcgtcggggattaccgactcccaggacagatctgaaaaagcgactgagaagcggctgaggttggtccgcatgcgagggtctagtgtaaccggggggccattggtctgattgggagagtgatggtgacttgaccacagacccccgacttcgttctggctctcgaagatgattggagagaatgtcccgctcggaaaattatgaagaagggttttggctgtgactaggcctgaggggccggcgcctgtggaatgcgatgttagtgtaaggtcgggtataccatctgggtatagagttgtatccgcggggtctcgactctagagtctggactcaccgatgattgctactttcttgggtgacatcttggggttggatgggaggtttgcaatgtacaagatccctatgttttgtttgtctgatgtgcttttcaatataacgttggaagtaacaactcggcagactcgagctgttgtcgctagacttaccccgcttatatccacttgggaaacagctcgggtttctttcttttctatataaaccgtggacatgtaatcatttgcatgtccggagtaatcattttgaatacgatgtcgtacattcgaagttgtataacatcgacaattagtaacaagtctacgatagtcatctagttaagcacaattcgaaccagcttcatatcgccacacccacaacgggcgtaattataaccccttaattcaaatatgtatacatcgatgtaccttgtacatctctttcaagttccaatacgccaaaaaggcggagcttaaggctctcggcgtgcataccagcaaatcatgacgttaacgccaagcataaccccagcaaccagggttcgtgaattccctcatggagcaaccacgaccggacaatttcctggcccccgaaaaaaaatgcaacttgagcgccaggactgaatttcccatattggacgcgtgctgtagggtggcgtaagagttcgacaaaaggtcgagaaaaagactagcggaactctatcgtattcgcatcgctcgtgctcatgctggtgctcgttccatatcggtttgtgtgcagatggtactttcagactcaggagactcgccgtagccattcagtaacttggatattgggcgagtgtagattgggcctgtatgcctcgtcgcattcttgttcggtgaccaaggtatcgacatttctctcggtcaaggggactctgtggtggttctttgttcggaggagttccttttccgcgaaggaggatggcgccagctttgagagtgtgtctcggaggcgtttgatgccactggggaaggatcgcggtatttgaggtggaccaaatgggttgtcggatctccatgggtagtcggaagtcacggactggacgtgcttcttaggagacagtgttctcgtcattgcttgcgacgttgggaggttgagggagttcgctgtaaatgatttgagttggaaggagtagggattttggtcaagtacgatataagcaattattatttctggccttgtagctaattccgcgggacccgcggtgttgccccgtcgtagtatcatcggatccctggttgtctatgctggtcattcatcacgcagtagtagttcgctagtcgccatacttcccccacaaatgtgtcgtgggtcatgatcggcggatgcagatcaacttaggctgatcaactatgtactattggggctcaccggttagtatttgacacacaaacaatggctgtacaataaatatctggcgaacgtactacgtcatggagatgccgatcaaggcatagttttgtagactgtcccagggaagagtcgcagagatggtgttttctgacgaataggaattgaataaatgaatacataaaccgtctagggtcataaggcgtggaaagtgtaatataaatctagcatataccagtatactacttcatgttcaattctcaatcgctacttaataagtaaatcggaaactgggatgatcatccccagcattctccagctcctccctgggccaatggtaacggtgatctctcttgccctgctcacgcagccgattttcacggtatacataaccaaagaacacaatacacgccacacctccgatccatatcatccctagactaacaccgaacccagttctataagtcggagcctcagagtcaaagaagacattgctagcgaccagaccgccacagttaccaaagccgatctgcatggccgaggcgatagattgcttgtaatgcccagccatgttgttactcacccagcccaacaagatcggctgcgccatgtatcctccaccggtgatcgcgtatatggcgaagtatcgggcagcgactggcaccaactcctgacagatgagaataacgtacccaattgtggcgatgacgcatcccaacatggtaaatgcgaatcgatggcggagtcggtcgctgatgaaggctgtagctagtgcgattgctgtcgcgacgaggtagatgggaatactcatcacttgagctcggacagatgtccagccgagctgtcggaggatggtcggggcgaagaatgatgttgcatagcctgtattgacgattccaaagtacataatagcactgaaagcgactaattgttagtggaagctatgtaatatcggcactcaagcttacccaagatagatcttcacatctgagaatgtccgcttgatggccggcttgtcgaagcgattcatttgcgcttcgccgcggtcgtccgataggcgccgaagtagcaaagcacgctcttcctcattcaggaaagtagatgtttcgggccaatcgacgatgaggaatttggcagcaattccagtgaatactgtaagtaaaccttcaatgatgaagatccagcgccagccgctgtatcctccgacaccatccatctgagctattccataggcaagaagctaggagaatgatttagtgtagaatcaactcatcatgtaggcaatacatactccactgactgcgccagccagaatgcttgcgctgaagaaaatgttgaatcgccattgcaactcgtggcgcttgtaatacatagcaatcaagtagatgcagcctgcataatattagtacttgtgttatcaagtcagggatcaactatccaacctggcatcaatccagcctcaaacaagcccagcaagaatcgacatgcaacgaggccaccaaagctctttaccacaccttgacatgtggtaacaacacctgatatcatcgaggtcagcccatgttccttgatcctatatcggttcaaacataccccaacagagcatgatcccgctcaaccaccaagatggcggtacctttttcaagaagagattgctaggaacttcgaaaaggatatagggaatgaagaagataaagagggcgatgttgtaatcatgtccctccatccccagatctttctcgagaccctgaatccgcgcgttaccgatattgatccgatcaagaaaggcaagtaggaataaaaacatgagaatgggaacgacatggatatcgagcttccgtagcagtcgtttctctgcggctggatctatgtccggcacggaaaccgcggacttgacatcctcgaccgtctcctggtatattttcttctgctccattttggatatttcagatgaacctcaaattgacacaagcggccaccaggataatccaaaatatggtagagcaatagccccttttatatacgtttagtgccagtcgatataccatcgcatctggggaaatccggggaatccggggccccgcactacaagcccgcaccgcgatgttgtgttgattcattccgcgttctttgatcgctgtcggtatttgattccgcccctaggaatgccaagaatccccggcttggtgtgtagcttcgtgtctggcatgttgcccgccgggtacctggtctatagtcactgagtatgtatttgatcgcaggtttgttgatggctaggcacttgcgaacctattcacttggtcagagggttatagctcgaggtcttgatattgtatatatccaaagccatagtccaggagcggggtatacatttgcaatttacgatttggggtggcgttgaaatataaagttcgtggccagtgaagccgaccctatttatgatgacggaatggaaccgcatcatgccgcatagagggctcttgaatacgatcgctcgatagttggaataaccgatatcaatatagccgaatatcgaattcaaatctaagctaaggtggctagaattgggccttatcatgctgaccctctcacgagccgacattcttgcgaatagttggctccaatgagaacacctgcttatccgctgcaacatccttgtagactatgtcccagcgttcttggagctcccgaggtgtttcccatgcgttttcagggtctcgcagccagagtcgcaacaaatgacgcctaatgtagccatgccgttagcacatccatacagcaataatgtatacgaacgaaaagaacatactctttaccaggctcatctttaaatccattccgcgcatggaaaatgctaagattgttcacatactgcacatcacctttctggaaatccagagtggcactgtgctttgccgccaagaagtgcaaagcgtcgagcgcctcagcttgcgcctcggtgataggtgggatatccttcgatcgaggctgagccaggaatccggtgaagtatcgtcttgcgtattgaatcagaaccctctcgggggtagtggcagtggctggttggtggtatagaagtgggcggaggctgtagggcctggctgggttattgaaactaaacagtgttaattttaagtctgcttccttggcgcttggtaatccttacccatctactggccaatcctgggacagagtgtgaatgagatcaggtctttccttggccaggatgttatacacattccagctgctagcaagatagctttctcctccctctgcggcgcggttcagacagaggagtgagattatatcgccagcatcagtgtggaaaacttgcttgtcagacgtgtttgacggggctccgataagcttcttgtcggtcgtgctagtgaggtctttgatatgggatatcacgggcgagttgccatccgccagtcgagcttcttgctgccgtcctcgaatattgccgatgtgggaagatacaccggcatatatgatgatattgtcttcccgggaataattatcgatgcgcaacccccggagaacgacgaatcctcgaccggtgtggatctccttcgaaaggtctcgaaggacaggccgcagggtaggtagaggaaaattcgactgattaatatgccccgaggaaagaccaagagctgttaagtcagcaatgggaacttaatactgtggtcaaaagattacttacatttgaagctcttcaaagcagcgtcgagttcatctagctgatcatcgctcaactgataaacccaatcatcccgcttctcgacgtcttttccttcccagactagtgacgataccagcttctgtgggaagcctgcaggcaaagtggactgcaggtcctcagtctcctttcgccgacgagtacgctccttgtacttttcataatcaggatgatactgaatatcgggctgggtggccacagtgatagtctgaacagcggacatatttgttatgcagaagagaaataacagatgtcagatgaaagatccttggacaggtttatctttggtcacccggagtgtggtcacgacatcaaccccgcaaagcgcgagataagtcgaacaacacaggagaaccttacagctaattaccaacttcaatcgcgtcaatattcgcaattatccggaagtgacatccatttcagattcttattttgacctttctgtctgtcaatatataatcatagggagaaatgggttcgatttgaaacattaatttgaaatataatgatccagtgtggtgtaaaggtcggattatgattatcccaccttaaccaatgtatacaggatgtctgatagttgctcatgtcttttcaaagtcgttgaatcaatatagagaccatcaagcttgtattgcggaagggattgcgggccggaggcttgggacttgaggaattaagtgaaggataaagcggtgctattaggcctcttgcatctagtagaattatgttaaatcaggaagctgataatatatatttctcgccttctcccattagatcgttcattcaccaaaaaccgtggtagtagatcataatcatctctaattttatttgctcaaagatatatattaagcagaaaggtaacagataaaacgagattcataaatcgcgctcggcgcgcttgcattagagactgctcgtaacattttcaaatatcaacacctaattgatcgcatatagataaattaacctagttccgagtatgctcaacagcaacagcaccaggctgcttgctttcttcgtggctcatctgaacccccttctggtgtgccatcacctcctctccccgagcaacatggttagcaccgccaaatagaatatcaatctcctcaaggggaacctgcttggtctccggaataaggaaccaaacgaagacggcaagtaggaagttaataccggcaaacatgtagaaggcatagaagccctcgttgtcgaggaaaagagggaagaattgctgcacgatggcgttggcgatgttctgagtctgcgatgccatacctacggcctgtgcgcgaacgttcattgagaaaatctcagacgtccagatccatactgttgcgccccaagatggtttgtctgaaaatgatgttagtgaagttccgtttgcagggaaatggtaagtagaaggaacttacagaataagatgaacaagaacagaaggaacacaatcgatataccgacaggctccgacttggctccattggcaagttgtggtgtttctgtttcgacggcggagacaatgatcatgcagagacccatgccgataccaccgacaatcaagaggaactttctcccgaatcgatcaacaatccagacggcgttcagggtgaagaaaattccaaaggtggcgttcagagcgttgatcagagcaatctgactgtcgctggtaaacaccttctggtagatcttggtagagtatgagttgagtgagccttgtccggtgatctgttggccggcattgagaaccagagctagacccatgcgcttgcggagagacttgtctttccagagagccgagtaattgctagagatagcttccttctcgtattcgatagcctcacgaatctccagcagctcttgctcgacttcctcctcggtatcacgaactcttcggagagcttcacgggccttctcgatgttgtttcctctccggatatacctagtaatggtcagaattgctcgggccaatcgaaatcgccaacatggacttaccaacgagggctaccggggatagtcggcaggagggcaaggatcaaaataggaaccaaaagctggaaaataacaaccaatctccagtcccactcacccagctggggaacatttttagtgcaggcaaagttgatccagaagcagatgaacgatccaacagagtagaacatctgccagaaagtcatgatcttaccacggatctctggcggagccaattcaccaatgtagatagggcccgcagctgcaaaaacaagctgtcagtccccgtcattgaaaccacaggatcaacaagacttactcaatgcgataccctggccaataccaataatgcatctaccggcaaggaagcaggcaagatcgtggtgaggagcgaaggtttgcataaaggtggcaataatgactaaaatacagccaatgcccattccaagtttgcggcccaggaagtctgcacacgggcctcccaggaagaaaccaccaaagatagcaccgaccgtgtatgctgtattaattgagccgattgtcgacgcatttgggtggttcatccaagcgagccagttcttggaaccctggactgagttgaatacagatgcatcgtagccgtagagtaccatacatgatgctgcaacgcaagagatgtacctaggaaattagattagggtatgttcagcggattatatgactgtgcaccaaccaattgtacgctctcttacgggtcattgaaaaagtcattctgatgatggcctgtctgttctaacagtgtgatttgagatatagaaccacactgcaatatattttcaacttctgtgggcagtgacagacgaacaactgttgcccttagtgtgagagaacagttaaggaggagctacattccagggggtacctgagtgggcgaaggctgcagctatataagaaagtacaagaagcgatcagggcgcgttccgggggtagaaaatacaaccccagtccatgtgagcaggtggatcagaccatccccagaatcaacaaaccccggatgtgccaagagtgcttttggcatttggataacggggagccctcggctccaggatcgctgagtggtgggtatctggggtcaatggcacaagggcaacgcatataccacgcctagtcgatttctcattggctttgaaaattctcacatgtgcgggccggacctggggtaatggacatctggggttcgaggatattttcaagcttttgttccggcgagatgaagttggggagttttccacgaataggcgggctggacgacagtggcttaggagaaagtcaagtccaccaataggggaaatggtaaaggacagtatatttaaggcaaaaagggcgctaaaataaacaagtaggagatacggggtacataataagcgactgcccaggtagttagacttctggggttcttttaggctggagatagggctgactttatccttataaagagacgtggagccggggcaaccttttcttatgttctgctgataatacattctttggcatctctatttacagagtttcactagaaatagattgaataggctaaaaatgtgaatccaagctaacaaggctctaataataggctaaagacactctggcaaaggaagcatgacttgagtaatccgtagaaagattcatagaagagctttggggaagctctacggagtaatatatgttgaattgcttttctgtaagaacagaccaatctgccttctatggataatcacctaggagctgcgcgcgcatatctgcatgtataaaacctgatcgaactatcaatgtaacatatcaagatatttccatttcctcctttcacttctagaattaagtatcagtccgaaacattcgcaattcctctcactttcgcctgtaagtatacatatcacgtgatctcgtgatttttcacaacgcgatccgcgacagcgaaggtcccactggtataacagtctcaagctttatttttctttgaacatattttcttttgtctgaatttgctgtgacctacctagatatatgatcccggcactctacctaatccagccagttctgttattttgactacaagcaatgccaccccgcaaatcgaagaaaaagcagacgcgacttgcctttgctgcttcagccgcttcgccttcggcggatgcgagtccggagagtagccgatatgcaacacttacatatgatcacccaagcttgggcacgtaccgtcctccaaagtctctcaacagcgagtcggggacttcgcccgcgagcaaacgtccgaagctccccgccaagacgaggtctaaggataaacccacaagtacggtgatgatctatatcctcaatgctaccagaaaactaagatgcaaaagacgaactgttcgtagagaaatcgagccatgaatccttagacgaaacaatcatccccgcctcccagaagaggaagcaagtcgcgccacccgacaacctcgacccggtaaatctcgatgacgcccaagaatcgaagaattcccgctcgcgaaaatcacaacaatccttggaatgctcaaagacagatagcgagagcacaaatggttctgattcggaggagctttcccggccgcgccgatcactcaagcgaagggccccaagctcaccgattgactccagcgactcagatgagccagtagcctcttcggcccccaaccggcgtaggtctacccgaggtggccattcttcaagctcgcctgttatactcagcggtgattattcaaacgagtcagtggctccttcgaccgccaagaggcgcagggtagcaaggccagccgtagtttcagaacgtgatgaagttgactcggacgaaccattggcctcctcaccagtgaagaggctccgacgtggaaaagcgaaagaaagtccccaagccccccacacccccaggcacatctcgcagcaggccagacttgatattgcagaggatttggaggaccttcaggattcgggtaggaaccaattagcgtacgaggctcgtttatttatgctgatgcaatcatgcgtagttgttaagaaaagtcgaactcgcggccggaatgtcgaatctgcccgagacaaaagaatgaagcacctcgaagctttgcgccgcagacgggctggtatgaaagatgaggaagaggaacaagaagatgaggaagacgacgatgatgaagaagaatccgatccagatgtgcaggagattaaacaaccctctgttcgtagcctctggcgacatgacgacggtgacagcgacatagaatcagccattgaccccaacgagaacctcgatcggtacgaagatgactttgtcctagaagatgaggcgaacgaccttggcgttcccaccgaggagctccccttcgagtttacccgacatgcatataagcagccgaaggaatacttccgcgacgtcatcggctggatggtgcaaaacaaactgaacccggccttccctcgctctgacgacatgtacaagatggcattcatgaagctggaagatgaagtcaagggtcgggccggttcacagctgatttcttcagtttggaaccccagtttcgtatatgccctccaggcccggccgcacatggaggtcgatacctttcctacagaggataaccatccctgcgatgcttgcaggcgctctgggcatcccgcgtctcgagagatgaaactctacggaaaggcgtattccctgcaaacgttagagccactggaagatgacagcgatgaggattccaataacgacgacgatggcaatgatcgggaccgggatggccatgtcattcctcctgagaatgtccggtactacctaggaaagtaggttttgtcttcagacacccattcgatcgagtccccctctaactgtttcttttattttaacagacaatgtaatgcgagagcgcagctcacccacacccttactcactggcgctaccatctcaatgaatgggtcatcgacttcctggagcgtacgggccacatggatgccgacgagatcctccgacgaaatgatatgagcgtcaagcgtaagacgcgaaatgcaaatgatgtccttgacagcatgactggaagtggtgaagtcgataagttgtggcgtgacttccacattaagctcaagtctgcccgcgagaaagaggtatgttcttgtagtggggtctcggtgcttgatgctaatcgggtctgtccttcatttagtctatctacggatgatgagatgatcatatccaagaacaagttcgagggtcagtatttgtcctcgaatggctttatcatgaattttcatgaagtctgaaccttgtcactacatagttttgtggcatcgcttttcttttgcgaagtttctccggtgctcctttcacaatgataccctttttttctttctttctttgcacatttctagtcaggtatgtctagctagcctaccaaaaagtacctgcaggttcagccagctatctcaagaaactatattcgcccaagagcctactgagtatctatctccaatgcagttttaggtattcgtaggcctataagtatggctgggattacaatttgcgaagataaccaaacccatccgttttcattacctggacatgcacatggggagagaaaaaaaaaaggtgtataggaaaacaggaagaaagatgattggggttgtacaaatacatgcatgcataagctgccggagccaaaatgtcagaaagcatgagagatgcgaggagagaaaaaagggaaaaaaaaaacaagaagtataacaaagatccgaacaagtcaaaacaagacacgaatcgggaaaccaactctttccgagtgcttgtagtcctatattttgagatctggccaaaataggtgattggaaatcccaggacgtgacagaattttgccgacgtgcgcctgggtatgctgtctgcaggagaccaagtgtcgcggccggtaattgtgtcactgggtccttcgccaatctctctgctttccgaagtggtattaatttacagagtaggttgagccgtcttttcgggttcggagccggggatgagcatctgcgagtaggaatcataattagtatatcgtttcaaagactgagagtccgccgaagagcgcaaaaaatgccattcgatgatagtgtcgagaaagagaaatattatggaagattgccgagatgcgaatacccgaggcaatgtacacggtgtcaatagtgccaatgacagcacgaatcggggattcaagataactgttgcaatgccgaaaaatccggagcaaaaaaggtgaaaaagaagtaaaacacatacctcgttagctcccttgatcattccctgctcgcgctccatctggatgtactgctcctcctcggcgtaggccaaagcgaatggcacaccgagcaggaaagcactggtgctgataatccagagggccttgccgctgaacgaaaaggtggccttggtgaggtttgtgatggaagagacggtgctggagacgttgcggcgggcggatgggggaacaatgtctttcagagcggcgatacgctcgtagagcgactcagcctcgagctcgatatcttcctcgtcggagatctcggagtctattttgcattgatgcccatgttagatacggtactttatgttgatttcagaccagtgttcatttctgggtttcgatgtcgcattgttgaggattgggattggggactgggatgataggaggaacttcagggagcagaatatcttcccatcaaagcgattccccatgcaaatgacaatggcgcgatgcgagtttcgtctgattatgggcgttcgggtttcggtactaaccagtgtctgagtagtcatcctcatcatcggagaccaaaagagcatcgtgtttggtggcagtgggcttatcggtgaagtgctcgtcttcgacttcagtgagcttgaccattttgggcggtttgggtggtttggatgagaatgacgaagggggtctagttaaaggtgatggttgaatgatgggaggacgctctggtttcgctccgacttttttgccgaaaagcggcgaggagcttggacccaccgacaacgatgtcatttgttttcgatcttatgaattacattagttagttactgatgtttacatgaacagtcttttggtgggctttttagtagaaaggtgagttgagaaaggccatgattttaaaagagaggtgtattctacatagtcgaaatgctggccatagtctataattacagattaccacatgacccttatattcgacgcatccaagcgagtcctgaggcatagaatcatctatttaccgtcggccaagcttccaccgggcaatccgttcttggatctcctcccaggggaaggaccggagcttatagccttccaactcgccctcctgcagcacaacagtaggcttaccagtgcccttaccctcattgtggacatctccaccaaagaccttgcgagctacacggcggaggtcctcgacggtgagggcctcgatctgctcacacatctctcggacactgaccttgcggccgtggacctgcacctggcgtccaagatcctcaagctcgaccatgcgagattctaggttcatgagcagcgaggaacggagctggttcttcgcacggttaacttcctgcgcttgcagcgagctgtaaccagtgtccagagtcagggattgcagctcgcggcacatgacctcgaccatctccgtgatccgagtcgggctgcaggatgcggaaattccgaagattccgctatccgtgtagctgtgattgaaagcaatacagctttcgacccaaccgtgctggttcagcacgttggtgtagagtcgcgagtacataccctttccagggccaccggccgagaatgagccaccaccaccgaggagggtctggagagtagcaagagcgtagatatcaggcgaggagatggggagagcctcgaaggcaaggtggatgtgactcaagcgagggagcatggggctcgcggggggaggaatcgaagggagggcgataaagccacccgtgtagtgagcaggttggcggaggttgagcgcggatggctcaaccagggatgagtggagaggctcaactgcagagctcttagaggaagagagattcttgaggaaaggaagctttgacaagagcgaagagtgtgttttttgagaagcagccggactgctgattgtcgatgagggcgtgaacgaaggaacggtcggcacctggccttcgtgggcggccgctggggaatcagacagtgtggtttcgattccgctgccagaaagtacaggacccttggtcttactgatgtcactcggcttcatgtcgccaaagtactgctctgtgagctgaacagcctctgcatgtggcactcccgcaaaggcaaccaccatccgatccgggttgaagaaaagctccctgtaccgctctaccactgccttgttgatttcgcctagccgttcttctgggcacaatagcggatttccaagagtgttgttggcataagcagtcatgtgcaccaattctggaaggatgagttccggcttcgcccagatctcgcctatctcgtactccgcagttgcgagctgttggataacctcctcttcagtgatgaggggatctcgaatggtctccgcaagcaggccgagcgtggtaggaactgccgagttgaaactggcagactggtacatcaaggattctcgagatgaggcacactgaatgttaccgcctagggactccagaatctcaagcatttcatctccagtgcgcgccttggtagacttgaaggctagacggtccataatgtggctgactccgcgcagactctcatcttcgtagcgagatccagcatcgacgtaaactccgacaccagcgaagggacccggtaatgattccgtggccacgcggactccatttgaaagtgtggtgatttgttctagctcggcgggatcctgcggagaaagaaatagttcgtcagttacaaatgacgctgtgttgtaggacctatcgaggctctcttaccttgaccgattcattgacggtagagaggcttcttgacacggcgcgaggagctcgtgtcaatggcttcgcggactcgatggcccgcaatgctgtgcggcgcatagtggttctgtacaaatccaacagcctgattaattcgggatttcttggttgcaccgaatatatccggtaaaggtgtgatgtagctcggacggattgtcggcgaagaatcgtaatcctcgatccaaaatgcttagctaatccgttgcatggtggattcttacatattctgttgacatagcagatcaaagtgaataactaaatacttttatgatatttttgacaagaagcggtgttttactgattttttgacatcattcgtgactggcgtagcagggagtgtctagtccgcttaccccagggcatgacctgcagggctcgaatatacaccaaaacacatggacgtggaatctgaatggaaatttgcagaacaatgagtcgtcaagttttctatgtactaaagattaaataactaagggtgttccgaagcccagtttctataccaatctagacatgaagcattcgcaacacttgcaccaatcttgatgttaagcccacacaaaatctgcttaacagcattctccaccttcttgccattagaagtcactggaatatcaggacatgcgtcaataataccagggacatggcgcgggctaagctccttccgaattgtggactgaatgcgtgccgcgagatccgccggcatacccgactcgttgccagcagcaagccggacaaacagaacgacggtttcatcggtgtcgataccatctcgtctccggccaatgcaaagagaatcttccacctcgtcggcgaaatgcttgagaagaatgttgtaaatttcggcacttccaaatcgcactccggatggcttgagtacaccgtcgctgcggcctagcatgaccacacctccagtttgtgggttcaagcgcacgtagtctccatggtgccagactgtgggcccgaacaaatcgaagtagctcttccggtacttctccaagcctgttggtcccgggggccagaacatgactggttgggctgggaagggtgtgatgcagacaagatcaccaggttcgcctgatgcgctgatatccttgccagcatagtcgaaaaccgagatgtccatgcctagagagcggcattggatctctcctttgtaaacggggagaatagggcaaccggaggcgaagagagagaggatgtctgtgccaccggtgatggaaccaagcataatgtcgtcgtggaaagaggaataaacgtattcgaatgtcgatggtgccagtggggatccagtactgaagatggcccgtagggacttcaacgatactggcctatgggcatgctcgcgcgggttcaaagcagcttgttcgaggagagagaggtatttagcggatgtaccgaaatgagtaatttgaagctcttcgatcagtcgtggcatggccatttctccctttccgccttcagtgtcaaagggtcggaagggtgaaccatcatacaggacgattgttactccactggccaagcccgataccagccagtgccacatcatccaggttgtcgttgtgaagtagaacaagcgatcacctggtcgaatgtcacagtgaagaagatgctctttcttgtgttgaagcaatgttcccagagatccatgaacgatgggcttgggggcgcctgttgtaccggacgagtacaagatatagacaggatgatccggtctcaagcttgcaaactccaatggtgcctgggggttcttgacctcagacaataaatcaccgtagacctttgctttcccatttgcaggtcgaaggtcatctagattttcgtcaagttccggagtagtgataagggacaccagaagctcaaggtctggcagttccgagacaatctccgctaccttcgcatgtgagctgtgtaccttgccattgtagaaggagccattgtccgcaaagagaaccttaggttggatctgcttcaggcgctccaatacagcatgcacaccggtgtcaggtgacacaccagtccagaatgctccgattgaggctgcggccagcattgccacgacggtagtagcatggttgcctacgaagccagcgacacggtcaccggtcttcacacccgcttctttcaaggcgtttgcgcactgtcgaactcgctcccgcagctccttccacgagatatattcgcgagctacttcagtggcgccaatcactgctatggaatcttcatctggcgagctggcgggatacagaagattctcggcgaagttcagagtgctgccttcgaaaaatgcaggtctagggaatagcacttcttttgtatccagtacctatgttgatcggattaggatcggatagctcaagtataaatgggaattactcacctgttcgtatggattgtgggcattgattttcgtatagtgccagatttcctcccagaattgagctggctcagagacactccatttccagagcgcatcgtagtcattcagtgacaagccatacttctcgttcactttagtcatgaaatcatagatctgggttgtctccggggcggagggtcgccagagctccttggcctctggctcaacgatttcgtcgatctgagacatagctatgaggtttgttgcagtagtgcgcgcaataatgccaggaattgaacttcggagtgtggagtgtggagtatgtctgtagaaatgccgattgagattgaaatgtgctcaatctcttgtcacactagaaatcccagacaatgtagcaattgacttcccagcagacaacgatttgatagggcttcacagggtcaatggtcaaagcttgcagtcaaaagcgagttcacacaatgcaaataccccagggggatggcggggcgggaatgatcgggtactgagttgccgatctcctcggctacggggaagataatttctcacaaaccgccccggatatgcattgtgaattaaattatgccgaaggccgaatcttcaggtcggtcacgtttagaagtgacggcctcaggctccaaggttgccattgccgtttccgatcatgattcacgtcacctccatggacatcgggatgtaggtgtcacggaccttgaaaatggacatgatgtgactataagggtttttagtcggatatgccggatgaaccccttatttcataacatgatattacaatagatggacaattatacaacgtctacggagtagagatagtattgctgttcacaatccaatatttatgcatcatacgacttgatttgtctctgtaacttgggtctttcgggtccgagactttttcgagtggaaaaaaaaccccctagtattgcgctggtaatattacatccgcactagcaattatcagccaatcacacgtaattttcgccgtactgcatgcgtttttaattaataccaggaggtcactgcataatgggtgcttagcatgggaaacacggaggtctcgctcttatttaccttctcagactctctccttcttcttcttctccaaccctatactcggtaaaggtgcttcattatctcggtttgtagtgcaacggaaattggtcccttcgtcatccgaacgtagggctctttgccccttcgtgcttcttgcccccattccacgtgcatccgattttttaagccctttcggagtattcggctcccgctcacgtcaaatcaaccttgcggtacgtctcaatctgtgaagctgatgaccggcgagtttctgagtcggagtgacttgggaacggagcatggctcagagtgtcgcatcgatgcctggtccagaacaatccactaattggctgcggtttccagattgaacacattgcctgaggttgccacgactttgaagaccgctggagtttccaagaacacttgcccagtcaaacacatcgattatcaactacttccgatagtccctgccttaactcgtcaacatccggacgcgctcaccccaaagcgcccctcgatcctgacgtgagaaaaaaaaaagaacacccgtgccgaaaccttgcgctgtttcctcttgcgatgcctcgtcgatttagcaacaactcctctaccgacacctctaccaacccgccgtccttttcaccttcttcgggaaagggcggtatctccactaagggccccacggtcaagtccaatcgcctttctcagttattctcggcctcgccaaagtccaagaccgaacctgtgcagagtgggcatcctcaacctagcaattcttctccgccgataagtttggcctcactgtctctaccgacgatctctctatcaacagccactgcggacaatccgaacatggacgagctgcctacaacactcttccagcctccaacccctgaggaggctcgtcggctggccaagcaacatgcccagttcggtcccatcggtcatcctagccaccgatactccagccgacaccccggtggtgtcttcccggagccggtgatggacgagccgccgtattattacctgctcaccacctatatcagttacctaattctaatcgctttcgggcatgtccgtgatttctttggcaagcgattccgcgaggaacactaccgccacctcaagcctcgcaatggttatggcgctctcaacagtgatttcgacaacttctatgtgcgtcgtctgaaattgcgtatcaacgactgctttgagcgccccgtgactggtgttcctggccgtactattactttgatcgatcgggctacggatgaccacaaccagcacttcttcctgacgggtaccactaccgacactttgaatctgagctcgtacaactacctgggtttcgctcagtcggatggcccgtgtgcggatcttgcagaagaatccatcaagaagtatggcattgccgcacccagcacccgagcggagtctggcacgcaggatatgcatctcgaagtagaggatttggttgcccggtttgtgggcaaagaatcgtctatgattttctccatgggttttggcaccaacgcaaccatcttccccgccttagtctcgaagggatgtctcctgatctccgatgaactgaaccacgcctccatccgtttcggtgctcgtctctccggcgcctccatcgctatgttcaagcacaatgatatgaaggacctggagttgagacttcgcgaggctatctctcaaggacaaccccgcactcaccgtccctggaagaagattctggtcgttgtcgagggactgtactccatggaaggttccatgtgcaaccttcccggtcttgtgcacttgaagcgccggtacaagttcaatctgttcgtcgatgaggcccactccattggagccattggtcctaagggccgtggtgtttgtgattacttcagtatcgatacctccgaggtggatatcctgatgggcacacttacaaagtcatttggtgccaacggtggctacattgcagcagacaaggtcatgatcgacgcacttcgtgccaccaactccggtgtctactttggagagtctcccgcgcctgcagtgctttctcagatctcttccgccctgcgcatcatcagcggtgagctcgttcccggtcagggtgaggagcgattgcagcgattggcttttaattcgcgatacctgcgtctcgggttgaagcgtcttggctttatagtgtatggccacgacgattcaccaatcgttccactccttctctttaaccctgccaaaatgcctgcattctcgcacgagatgctccggcgcaagatctccgtcgttgttgttggttacccggctactccgctggtctcgtcccgtgctcgtttctgtgtctctgctgcccacactaaggacgatcttgaccgtgtgttgactgcttgtgacgaaattggcaacgtccttcaattgaagttctctactggtatcgcgggcggtgcactgcctgctgccgaacagccggctcctccgcccgagctggagaaggaatggcaccgcaagcgctcggacaatatttcacctccacgctggcgcgtcgaggatgtcatccgacgcggagtccaggatgtcaagaaccccttgtactagtactagattggcttccttctcctcccggttgacatgacgctgtcttgagttcactaggctttgagatgagtcttcggtcggggtctttttccacaagcacgggttgttgctggtcacaccgtgccggagtcttaatcccatgtgtccccttgctctttgttctgagtttatatgatttttgtgactttcgctggacttggatcctaaggcacataaagcgagtgaatctcctcggactagaaagaaaagagggactcggggggaaacgaaaagatgagttattcgacagcaacgaatgaatatgccccgtctcctatgatccttcttactcttgcttcttcatgtttgcatccatacagaatttcatgttactttctttgtcgctgttatccttctcaagatattgcctaataatgttccactattgcctaatattgttccattcaatgctccacagggagaagatagctaaagaagaggatcttaaagactagaaagaccgctgaaaagactactaaagagtaccatcttcttatatgtacctttcatatgtgaatcctaacgaaaagtacatcttgcgttggaactatgttcaaaggtactaagcctattccaaaacgtcaatccggggaaggcccattcatatacttccaccacttccttcttcacttcttttcctttaaccatcttatctctctatttcccagtactcacttcgatttattgaaaacaaaatgtcttctctgaccaatccaagcctcgccaagtccttacgccaatacatgcagtcaaccttccgcattggccatggaactgtctcccctcgcagtctatacggcattcaagttcctgagttgaaagttgccttgaatgaagcctaccactataaaatcggtgcaaacgaatttgaccctgacgtcgtctttcccgaggttctcaccctcagcaaccaactctctaccatcctacaacaactcacacccgcccaagagaccaagttcgaaaaccatatcctacattgccttgctagtatggtgtacggatccaacatgatcgagcgcgccgggggcgattccgacagcacatttggcgctgtgtacggcaatcttcctcggaaaggcagtggaaggaccagaagagatcgaagaaacgaaggaagagttccagctaccgtaccacaaactgctaggagacatttccccggccttgcgcagttaccgtgaaattgcgcaacacgccagggctgcctcctacatcatcgttcaactctgcatacacgaccaagatctcagcgaagagatcattctccaggctcatagaatcttgacgtacaaagttgacgctgaaaccactccctgggaggaatacagtggtgtctatcgtacggatgaagtctccgccggcctacgtccattcccgcaccacagcatcgtgccattcaaaatgaagggaatggtccgcgacctccattctgatgttaaagaagctattgctaaaggaacactcgaccctgtcagcatagcctcgaaatacacccacgtcttcgttaatatccatcctttcatcgacggaaatggatgtatgtgtcgtttgatcttgaactctatgctcctcaagcttggcagctttcttgcgtgcatcggtgggacagaagaggaacgcattgtttacatggaaatcgccagtaacggaggtgcacttgaagatctgtatggagatcttgatgaagatgagaaacccgtaatgtataaggagctagggagtcttgttctggagtatgtcaaagagagtatgcaaaatctggttactacagtgctttcgtgaagtgtcttaagtctgattttcggtgttaatatttttgtatttctatggaggttttcctgggcatcgatggatggagtgtattaataccccttgttgctagtcaaatgtcactatttgtaaacctgtttttgtattcaaagtctggatcactaactaagtactcagttctgaatctcttgtataatcacccttctggtatcctcatctgcagactgcatgactgtttgacccctacaatcctcgatatccacactcgcacctttatgaactagataccgaataacatcacctttcttaagagccacggccgtgtgtaaaggagtttccctcataaaaggaaacatattcctcgaatattgatggtcttcatacataagggcattaaaaggagcaccccgatcaacgagcatttcgacgactttaaggctgtcagactctcgatagatcgcattatgcacaagctggcctattctaacatcaccaccacgacgtaggagaagatcaatagttgacaaagcggcgtatctggcagcataggagagcggggtattatcgatgtcacagcgcgtattaggatctgcgccatggtcgagcagccatgttgtcatctccgggtcctcgagcgcattgctagaacgagataattgttattcggctataagcttttaaaagagaataggttgtctcacgcaagaataggcgggtccgttctactcattgacgtgttgatatcccagccgttattgaagaagctggtcaagatagtcttcgctctcgccttgacggcttcgagtacgtagattggcgacacgggcattttgtgttggagtagctcgttcacgagatacactttgtttgacctgatggcatcaatcatgacctcgtagaaatgacggatatcgcaatcatcacggatggtgcgatcaaggaattctcgtaactgctgctcgctaagtcttggtagctgctgcactaacaagagcctttttgctgggatcgggggaggagtttgaactcggcttgtgtaaccctgttcaagggtgtgatgaacagacatggttgaatacttgaggtgtagagaaacataacagaaggaaagcaaagcaaaggtactgcaaagaatgatacaggaaggtcaatatcccgtgactattgtagtatcaccatggtaaaaaaaaaagcctgatcagccctgattaatacatgtaagttccataactcccgtgcaaacagaaaaacaaaatcagtattcgtcagtatcgagaggtggaaagagagctccaagagagatatctgatggtctcttaactaaattatatacgcacaaatccttcctgttttggcttaaatgtcctaagctaagcctatccagaacctatgtataactttagatatagacactaaccactgatagaactggaaacaagtgttcagtccggtcaatgcaaatggtatttctatcatgctgagcttttacgcttttatatcaggcgcccgggtcaggccagaatcaaaacaaaagaaaaaagcaagtcgggatcgttccacaagatgggagagatccttctgaatctccaaacagtaggctgtgaagtgcccaaaaaaagaaacagggagaagaagacaaagtacgacaaaaatagaggcgcaaggaaacgcctgtcagcaaaaacagagggatatcattaagattcaaagaatccagaatgtagcaaaacaacaatttgaaaagataaattgaatggggaagaagaaaacagaaaaagcaaaaccgtaggactcgtatactcgataagtcatcaaggaggaagccattccctccaccaaatatgtagaatatttctcgtcggcagccattcactcgtctttcagacttccgaccaaattgcgcagcacgtccatgataacagcttcgtcttttggctcgccgcctgggaatgagctctctggcgcatcgcccaacacgcgtgcgcgcgcactccggagaacttcccggatgtagtttttgtcctcgtagtcttccatgagaacagcttcaaagtcatcgattgccttattcgctcggtcaatgaatgaggatgactctggtggccctggtgtttgctgagcagggtgttgctgttgatggtgaggatgggccgggaggcctggaggtggatgatgctggtgttggtgttggtgttggtgttgatgctgatgctggtgctgcggctggtgctggtggtgaggtagcggatgttgctgctgaggaggatgcgacatgggctgtgactggggtggaaccggttgttgatgcgggtgcggatgctgatggtgttggaactgcaccccgccagatggagggtaggcccgaggctgcgggttattgtgagggggttgagaggatggcggcttttgttgtgaataaggggaatgatgctgaggtggtccatgaggaggccgtggggtttgcaactgttgctgctggccgccttgcggagcgggggcggatgcgtagggcgaagtgtaggttgaagggatggtcgctgcgaatgcagctgggaggttgttacggagctgactggggatggggaaggatgcagctggattgatagctggtgctggtgccggtaccggtgccgccgatactggtgctggtgcctgcgtaggtgcgggtgtcggtgcgggtgcgggtgcgggtgcggacacgggtataggagccggagtaggtgttggtgctggtggtggaataggagcagagacaggggcaggtgtaggcgccggtgggggtgcttgtgccggtaccggtgccggtgcagcagccgggggcgggggcggagcagtagcagtagcttgaaccggcgcagcaggaggagcggttggtttaggagcaggggccttcaatgcaggtgggtagggactagaccgtggtggaggtcctcctacattcacagatgccgggaaaggagcaggcggtatggaagggaattggaaatgctgtggcggatttggcaccggtggtgggccctgtggtgcataagagtaggacgcctgaggcatgtactgctgcggagtaggcgcaggaggatgggacacctgaggcggcggcgaagggcgtcgtttcttttccttttcaactgacgcgcctggaataagctgccatgaccagcccttgccatcgcgctctgcgtgcatgaacaaatgaccgttgccgttcagattgtgccgtacgctggatgtccaaccctcagtctcacacttgaagcggaagtacggatacttcagtttcagcgcacggtagatctgcttcaaggtcattggcgtgccggcttccgtcagagcatcaaatatgagaacggcgtaattgtatgggggctttgccagatcctcagtattgtaagcagactctggaggataattgggagatggtgaccgtgatggtttgcgctttttgaccggtgggggtttgacatattcttgcgcaggctctacagacaccttgccttccgttgagggaagaggagactccattggtgtaccatccggcttctttctcttggtgtacttccgcttctcggatggttttggtgactcgggaacgacagattctttggcaactgtcttcccagccttgggcactttaggtggaggtggtgtgatacctccgttggcctcacgcttggcagcatttttctgctcccgggcaagctcagctcgctcgcgcttggacataatcccatctttaggagggcgtcctggtccccgccggcgtgtcggctgtgaatcgttatccccattttcgatagaatccatcgcttgggacgatttggaatccctggtcttcaggacgatcttctttgaaggttctctgctctcgccgctatcgcttccaagtctgtcagactcatcgtcttcgtcatccacttcaatcgaagcccgagcatcttgctcttcctcctcttcttccttttctgccaatttttcttccatccggtccgctccagtttcgccaattgggacgtctggtagcaaaaatcggatgcgcacgcctccaatttggatgtaatcaccgctgtgtaacgggcgaacttgccccggcgatagccaatcagccccaatgaatgctccgttacgtcccattacttccatttcgaacaaattccgatcaaagttgtatgagatccggacatgcctccgagaaatccctcgatggcctgcggcactgccgtcaacggtcgttggggggtgaattgggatggtgggacaagaatcaggggatgggagcaaagccagcgcatcaacgggctttgcgtctccgtttccatcttgcaaagattgcattgcgagcgcattgtagtcggttgtcgattgtagttgagccgggtttgcatgtaatggtataacagcttcgtcaaaagaggatcttgaggatcgtcggctcatgttcatattgttcgggagatgcggaggtacatctggatcaaagcccatgatacctccccgatcactgacgacactgcccatcatagcagcgctttcctctcgcttcatacggttcggggtgtgtgatgtatttcctccacttgaactctttgcccgagtgcttcgtacggcctgccggtactggaactctcggtggtgcgcagcgcgggcagcgcgcacgtctcgtcctaggataaatgagtaggtattgacgtaaaaatgcccatcatcgaactccaatttggcaaatgcttgaatcttaggttccgatccagcgattgaggccgccatatcttgatatcccagggctgacaggtcggcattttgcgaaagaaaggcggctgtgagcatctcattttggtggagggcttcaaacgcatttttgggggccgcggaaaaatccaagggtggaaggagcgagggctgctctgggttcaatttcgggttcatggggtctgacaaggtctccatggcatcggttgagttgaattctgtatggttcatatcctggtgcgcggaatttccctgctcatcacctaaagctttcccattcagcaagtcctgaatctcacgggatatcgaggttgtgtctcggtgcaagctcgggtcgatgggcgtggggttctgggcagccatgtcgaatggctgggagattgagtcgtccatcttgatatctatgtgagtatcctggtgctcctcctgttttgcaggttgtaccatggtagtggagtttgcggctgattggttgccgaggagctgtgcgaggagcgcacttgcggcgctttgcgtatttacatcttgttgatgttgcgcagctgaaaagtcgtggctgtccgagcattcggtttttattgcgacgtccggggcgggcattccgttgggagttgacggggcagaattattctgcatggcgcggattgcggagtcgtctcgaggattggaagggggtgtggtgtctggtgagcagccatagtcgtatagggggctatcggggcctgggtcaggcggtcgatggcccacggctggcgcagtcatggtctgcgacgacatgacaggctgttgctgaggaagggagaggaatgaagttcctataagaagggaagttctcaacttggaaccgggcggtgagcgatggccgagttggtggctgcagatagccgtagtcaccgcagagccatgtttttttttttccttttttccttatttttcttcggctctcgaaatggcgatttgacttgcagaattcaccaacaagtatgaatctggaaaggtttacggttggagggatggagagaaaaagcgccgatgatcctcttccgggacaaattttcattcccgccccgcctaaatccatattctctccgaattgatccacctatatggattgcccgcaggtggttctcaccgattttgttgatcaaaagagcctagaactatataatgaatgtggcaatttatgaccctatgcaattgacctcattatactcctataatctcacatttcctcggtcttttctctagggtggagttgacccctctagtatggcttgcctccacgttgagatgaggggaaaccgtgctagtcgtaataggtactttaggcaaatgcaatttctatcttgtatcaagtccgtatatgcaagggtatacgatgtatagtactacacattctggggaagcggagtattacttgacacggggttaggtgtctgcgacaaacttggcaaaaaatgacagaaaactcagtgtttcttctgcttcgctcttttgctgaggcgtgcttggcgaatctaaacgaggagtagcataaggaccggcctggctgaggctgagagagttggcagaaacctcagccgctgaatggttgtcacgactctcattgtgtccctctgatatgacgccaaccaaattttgatgggttgaaagcgcatgtgagatcctgtgattcaatcatatcatatgctcacaggtagaacccgattataaaatcggcaccgacatccatgctctgtagggcttggctgttgatttctcccgtcagaggacacggcgaatcgatagtgcttgcgagattgtcagggtgcgagagtcgaataagtggaagtctaaatcgatggttaactaagggctctatataaaactagccgcaaagaataacttaactacaagaaacatcacatgaagattcatccaccactgccccgtaggtttgaagttacgtttggagtgacatgagacgacagagcatcgggctcgtcaaagcgagcgacgttcagaagaatatgtgttttgataatctcttgtcgatctatgttgtagttggtctaggacaatcatgagttagggccggagggtgggataaaaatagaatgtgacgtcacctttctgacaacaccctacctctccttcttccacttttgaatgctggaaaccgttgcagcatgacagtattttgcccctgaataattggtgggttcgctatagaaagagtgtctagaattaaggttagccgcagaccttgccaagaatagccgcagcctaaggggatcattattggctcagatccaagacccaaaatgatacgtaatcacttagcttctctagttaactattaactagttaactaactagcttttctattctataatcctctccgacatccaatctgatattatcggtagatagaggtctatagatacaaattttcctaattagcctatcccgactcctggacttttaaaactctttgtaattggagttttatactagattatataaaagactcccgtcttaacagttagcttacaatcacttcactagctttacgtcgaagcaggagtgagtgttacctgccagatctttgtagcaaaagagtgcattggaacgagattattaagtacaagaagagacaggaaagagaggagaggggaaactcggggtatacaaaatcctacccatctgggaaggaacgacctgagatagtaatctaacccccgggcaaaggtgttttagtccctaaatgctggtttttcatcgttaacctggtcattaagtatccggtcgtcctcgtagcttcaatctattcctgatccggtttttctgaaacccaagaatgatcctctaggtttacaattgggagtcatgttacgatccaacgtttgctttgctttgcttgtttgcttgttttctagatagttgagcgagatgattcgaaccttgcattgtttacaaagcggtcaggatacagctataagaactagctgtctcccactttgcaacttgcttccttcctctctctccctatcttagttattctgaattcaatgcactcttctatcttgcaagacctggcacgtcacaagttccatggttaggaaattgatgttaagtgtgggaaaatgtatcaagtgacctcgctttgacatagttaatgagaataattctctcccactatggaggttctgccggaccttgtcctccggatcccgcccgtcttggctcacatatgacacatagttaagagcctcaccctctagttactttaggcttcgatccaccttccaatcgactctcccaccctcccacccacagcaccccagcgcagctcgaatgacatcctcgttgcccggattccgcaagggcttcgaccctagaactattatcacccttgataaacccctctcttcccggtgggaaattcttgagaagctgaatgagtatgacgatcaggtatgacccctctcatcccattacagggtcctcgggaatctgaacgagcataattggtaggtcactgtggaggaaaataaggcatatggcctccgttctttcgccgaagctaaatttttatgttgtgatcctcaacgccgtgcaacgaaaacctttatgcgagtctacattcaagttccccatcgaacaactgagatggatgatgcggacaccagaggccagcaagccatgtcatagatcccgcatgaattagcttccctgctcgatctaactgaaaaggactcaaatatcacaccaaagctcctcggatacaagaccggtactcaggatcgctcagggctagttccggatgggttcatcatatggcttgcttgggaaattgttcctgggctacgccttggcgatagtgatggcgatggtccattctggggtcttgaaagctctgaaagaaagcaaatccgtgaatcccttcttaaggctcttgcgtaagttcgatattccttctctgtatatcactgaatctaattattattaatgttttagcaagctgaaggagtatgggtggtgcccgagcgtggatagggcaaaaggtctagtttggcaccgagagactcaaacactgtatgcgaaccacgttatcttagcttacttatttactgattgaatatagctacttcatcggtggcttctgcgagaccatgaaggataagcccatgcgtgtcgcctgctcaacggttcgcgacttttgaacttgctttaccggatgatccagtcagctgggaaatggaagactgggataaggatacttcacgcaggaaatggtagctaacgaggaagtaaatgttccgctcagcctcacattgatctttgcttctgagcccagggaagagagggtcggtgcggcagtcgcgcgacggagggtgagaatcacccgctctcacctggcttctcactcacccagtctcacccggacggcagcaacccgaccttctgccgcagataaaccacacaccggtgagtaagtagttaggtgggagtgcctcgctagctatgttgtacagaccatgactaggacggactttgattcgagcctctttctccaatgtccgagaagctgatcaatgaaatcctcgaatgcaaccacgagttgtatacacagcccatatgctgtaactgtcggccataatatctgagtcactgctagcagccccaacagcagctttgtttgtaggcacacccgcttttgatcatggaaggagtgtatttgatttcagtgaggtcaaaatcagaatgagatagttcccattggcgcaaccagggttgacaaagctaatattcacgtccgggttctagcttctggatcctgggggacaagaacaggctggcagctcatcacaagtgggtgggtcctgacccccgggggggggagagaggatccccgacgatccccagaaactaggctggccaccacgtgacagtgggtttgattgtaataatcaaagatcatattttcgcgataaaaaaaagccaatcagaccctttacatctacctctttctataccttcacctcacaaagaacaaagacccaaatggccccaaaacccaaatccaaaaagcccgacccaaacccgcaaccaaaaaccacaaccccaaactggccacccctccgcccactcctcccggccaccgatctaaccctgacccccgtcctcccggaccaaatctacctaatccgcaatttcctcccaggcaccctctgcaaaacctacacctcattcctcgcctcgctaccactaaccacaacaccgggcgcgcccaagaaagacgaggcattgcgcgtcaacgaccggttccagatcgacgatgcgcggttcgcggagatgttgtggagcacgacggcgctgaaggagcttgtcacgacgcgatttgacgaagacgagtccgacgaagatgacggtagtcactcgcctgctctcggtcttgctgaacgcgcgcgacaactctggggcggggagccgttggggttgaatcctaatattcgcatttatcgatactctgcaggacagtttttcggacaacattgtaagctctttcttcgttcgtttttcgtgctgcgaattccattatggaaccatacacatacatacatccaagcaagcgaaaattacacaacactcgttaattaacccaatcgcagacgacgacgccaacaatataaccctccccccaccgaactcacgctcaaaagcaacacccgcgcgcacgacctggaccctcctgatctacctgacgtcctgtacaggcggtgaaacgatcttctacccggagccgacgcgcgcgaaccgtcatccggagccgatagctgttgcgccggaggttgggatggcgctgttgcatcgacatggtgatcattgtatgattcatgagggggctgaggttactggtggggagaagtgggttttgaggagtgatttggttgttcctaggtgattgcattttggagtggcgaggttgtagaggtgtagtatttgttaggtgtggtagaatcgtagtgggcaggtcctacgcgatctcgaatccgtggtgtttggtatatagcattgcatgggaattttagttagggaattaaacagttctagtcattctgttggatcatacttagtattgggtgcaatcgactggataacacggtagcaaaaggacaatatgaacaaggacgacagtaggtccctgtcacagcacgcatgaaagagacagttgtagatacaagttaaatagtcgtaaagagtggaaagtttgctggggaaaggagatgggaggaaacaatgagaatgaaacaaagagtgagatcatcagttattgaatagcagggtgacagatgagagctggacctcgccaatggatctaattcccggaaagcctccagattcaatttcattttatcttatcaaattggtttggaaacaggagacttctccccgtccagttcatactcggctcctctcatcatcccctccacagggccgagaagccgcttgaatccgtcccggcccaaccgtgccaccttcacatccgttttagtggtgatgctcgcctggcggggcttgtcgtccagcaaggcaagctcaccaaagtaatcacctcggtgatagctcttgacgggcccagagacaccgttcttggtagcctcggcttcgcccgactccagaagatagaatgcatctccgggatcgccttcgtggatgatgatggaattagccggatacttgatagtatccagagcatcggcgatcttcgagcgctcgtatggcttcagagaagaaagcagcgggacttcctccagaaaagcctcgtacatacgacggcgttggaatgcagagtccattaagatgcggcggaatgtgacgcgatctagagcccacaaagtgctctgcggctcagtggagatcactgtcgcagcacgcggggcattgtacatcagagccaactcgccgaaagatcctccgggtccagtgctggcgaccttgttgcccaagccatcaggaccaggctgcacggcaccagaaggattgatatagacgtcgaaatttcccttctccacgatgtagaagtaatccccggcgtcgccttgggagatgaccttgatatccttcgccggaatgggcttctccaccagagcattgagcacggtcgagaatgaatcatcgtcgaggtgggagaaaaggaagttgctactgacggcgctcttgagccgggaggcctgctcttcggtctttgggtggtgaggaggcgaccaactatctgaacccgcttcagtagggtttaaagattccgctgagaccgatgtccgacgaccaagcgcgtagttggtagggaatccttgctgtgcggatcgttccgggagaggggcaagctccccctcctcctcgtcatcctcccccgcattatcctggaagggactccggctgaacaacgatctacccacttgtaatccttgtgatcctccttcagcgaatgcactacctccaaacaaagcggcgctcggcagcgcagcacccgaattaggctgtcggaaggtcaggttggttggtgacgtcacctcgaagccgtcgtcctcggaatttttttggttgccagcagaattgtcgtcaactctagtgttgacggccggggccaaatccggagcagagtttagagccatgagggcgttggattgagggccggagaggccgcaactccggggttgaagctgagagagagggacgggcgaaacagagatgagatctgtggaaattagaaaggaatgaattaaataggggagaatgaatgggatgaaaatgtaggtaatgcagattgtagaggagaggaggagaggtagaaaaggtagagagtaggaagcaacggaggggcagacagtgggggattattggttggagtctaattgtaggaatactgcatgacctcgtccctctccttttttttctctccttttcttttctctctcctttccgttctgctttcttttttctttctttctgtctcgggaaaataaaatggaatattgcagggaaaaagaaggagaaagaaaaagcaaaagcaagtcaagccaacaacaagcgaaactgaaattaccttctaaaagcaagctcagctttacttataacaagcgagtcagtttggaagacaaagggggaagacgtggaaagatgaggggtacacactaaagttggtctgagcttcgtcgatcattggatgtgcttcacctttcacgcactgtgctatgtactccatgttgtacatatttatggagtaatggtgatcgacatccattcctatactaagatgtgggatactaggtagtataagatttaatttaagcccccgtctgagcgtcttctacacgtcttctagaatggcatgctcgccactaaagtggcaatttcgggaaccttggaagtatcaccacgtcacacatgtcatggactcgtgttcaaatgtcaccttatagaacgggataaaaatacctgaacggcaaaatcaaggaaagtgtcaagagtacagacgtttcatgctctggtggggaacgagaatggatatcatataatccacggtcttcgctcaataattgtagaagcatccagcatacctctatctagctatagcttcaaatacggaaccttgacagtatggagtacttcgttctccgttgataacctaaagctctctccatggcgtcatataaacgagaaagtctagatcgggcgcatagacccagccacagccacggttcacccccagcccccttatattggcgattggccatgtcgatgtgcatgcgaagtctgaattatagagcgctaagtactgtccagggccaggtactggtctgtgtcaccccccaccgattcgaataatttacttgggcctttttccctatcttccccaaactatcttttcatttttctcttcacgttctgtgtcagaatcaatatgggtacctttacatttcactggtgagtcgcgcttctagcatgtcccattctcgagatttccatttcgaaatctctcctcctcgtacaatgctgagacggttacttgcaggccttacaatgcgagcgaggtgttcgttacaggcactttcgacgattggggtaagacggtgaaactggaccgagtcggcgacagctttgtcaaggaagtgactacactgcctgtacaaaaagtccaatacaaggtatggcctttcttttttttttcttctctcgcacactttcgcctttgccttgccctcgtagattggatggcggtgagcatttacaatgacgtcacctgggccgctttttccccccatttataaggtcgccagttcccggaatccccaaagtcccaaacattttaagattgcctgattccccgctgactcaaaaaaattcaaaagtttgtcgtcgacgggatttggactacagaccccaaagcacgtgaagaacaagacggacataacaacgtcaacaacgtgctgctgcctgaagaaattaaggcttccgactccgcccccactatgtctggcgtgaccccttactctacaaccgcggcactcgctgccaacgttcccaaggagcccaatggggatctccctggtagcttcccagaaactccgggacaggaatccgaacagaccttttccgtggatcccattccagcttcgggaggttatggtaaccccgttaccctgaagccgggcgaggaagtcccccgccagagcacattcaacaacaataccgttggctcaactgtcactttggacaaagaatcatatgacaagggtcaaactctacctgttgacggctaccaagcaaacaacaccagccctgagactttcgcatttgccccttttactctccccccaatcacgaacaatatgattcctgaatccagtcttccgatcggtggaccctctcagtcgtacaccggaggtccagcgcagcaggcagcgctagccgatccggaatacttcatccagtccagtggccccacctcgaccacagcggaactcgctgctggcgtgccgctggagtcaaagggcaaggccaacgccaacaagcccgttgatgaggtcccccgggtggtgaaagactcaattgccgaggctcacaaggaccctgaggcgactacgaaccaggaggcacttgctgagaagtatgctaccgagaaggagctacaagaagtaccccgttgaaaactccgcagggaggttcgttcaacccgttgacgaggttcctcgggttgtgaaggactcgatggccgaaggttataaggaccccgaggcggctgcaaacctgaaagcagtcgacgagaaatatgccaccgagaaggaactgcaagagaagttccctgtcgaggactctgcgggtagacagaccaacggtcactaccctatccctcgggcagtgaaggactcgatatccgaggctcacacaaacccggaggcgactacgaaccaggaggcacttgctgacaagtatgctaccgagaaggagctacagcagaagttccctattgaagagtctgcgggaaggttcgttcagcctgttgaggaggtccctcaggtcgtgaaggactcgatggccgaaggttataaggaccccgaggcggctgcaaacctgaaagcagtcgacgaaaagtctgctaccgagaaggaactgcaagagaagttccccgttgaagattccgcgggcagacagatcgacggtcactaccctgtccctcgggcagtgaaggactcgatagccgaggctcataaggacccggaggcgactacgaaccaggaggcacttggtgagaagtatgcgaccgaaaaggagctacagcagaagtaccctgttgaagagtctgcgggtagatataataagcccgttgacgaggtccctcaggtggtgaaggactcgatggccgaggctttcagggacccagaagcggctgccaaccaagaagcagttgacgagaagtatgctaccgagaaggaactgcacaagaagatccgtgttgaggagtctgcgggtgcaccggcgcctactgccactgcggccacccaggccattgcgccccatgtcactgccagtggtgtggactcgtcagatgtgtcgccactttccacacctacggcgaaccgcagctttactgctgctaccccatcttcagcgctgaagaccaccgagtccagtgggccgactgtcacaactggccccgagactacttctactgccgaaacctcgactgccggaaccacggctgccgcgactgcggatcccgcaggtcccactgtgacgacgggagttgcatctgctcaggcacctaccagctcgaccgcagagccggcagatcccgctgcgaccactggagctggatctacccagtctcctgctacttcttccaagcccgcttcgccgtctcgcagaaaatcccacagcacggaaggtgctgcttctactattggtgacaagaagaagaagcaccgcctgagtggctttttcgacaagatcaaggagaagcttaaataaatgactcggaaatgtccaatttccgaccttgggatccgttctatgattctatcatcttgggcggtatagtcttggctgtgaaagccgaccgatatcgcatgctttttctctgatgccttacgttctttgcttctggatacctctcctgccctgttttactgcattgtatttctgcaagccgctttttgtttatgactcggctagtaattatcgtctaatcgaagtaccttgcttgatgtgttgattgtttatatcgtactttatgtcttgtacttgtatctaagccgaaatcggaccaaagtcttgcgtaatatgttgtacagaactcggagtataagcatgttgattcgacatggatcatgaaacatgaggttaaagacccaatcagaatagaacctgagaactaagaaagtcgaatgtacaattctccacgtataacccttgggattgcccttgtcatgagtggggagaaggtcattccctaattccgctcttctccacctttccccgactttggggacttccaatcttctttcccttctcctcccttcttctctgcattgtacaagcgaccttggtcttgggggtatctacaccaccgcgagcacaatatggctacccccacattgtccgccatgatcgacccgacaaagcaggccgaatacccaattgtgctaggggaaaggcttgctcgaaacccaaacacgagccggctgatcaacgttaactacaaccacaaatccaagtccgccacctcacagcaacgttcggtcatcacccactcccgatcggccgacctctatgacctcgccgtgactgataaggccccgaacgccgatcaaacgttgacctattcatacaaaggcagcgaggacccgtcgggcgagcgaagcctggtactcatctttgacccggagcggaaagtctttgttctggagccggtctcgacaaccttgaactttaatctacggtcggcaccaggaaagacggaaaagcaggtccgcgagcaatacgaacaactacagataaaggaagaagatgaaccagcgaacccggtagaagaccggcacggaggaagcgccagcgaggatgaggggccggccgacgacagcaatccctatgacttccgacatttcctcccgaagaatcgccgcgaggaggacaagccgccctcgggctacagcaccccggaacttgtcaccagccgggccagcacaccgttaatgccggctgccagatccgcgccgagacccgcacctcgacccacaacgcaagcaaaccccctacgacagaagagaccgccagcaaaagcacccgccaaaacatacaagtcaagcgagccggtcatttatcccgacccgtctgagcacggggactcgcgctcgtcgccgtccgatgcaggcaccgggtcacaacaagctgggcagtctcctggctcgaatatcattgtcgatggagatctcattattgatatgggatctccacctccgcgtccgctcgtggaccggacttacttctcgtcgaataatacaccggcagatgacgatggcgacgaagacgttggggagtttagtctgccctccccggtcggcaatacagctccactttcctcagggcacacagacacggctgcccaagaggacgaaatggaagatgatgatgctttggcggcagagatggaagccgcctttgagcaaagtgctcgtgaagaggaggctcggaacaaccagtacagtcagccaacgaccaggcaatatatccccagtgatgatgagagcgaggtcagcgaggaggagtaaatgtttggctttcttgtttattgcatctaccagcgtggcgccaggacggactttgattccaacgtactagataccaattgtaattgtagtatatttgacctttccactagttcagaatcgctgttctatttagtgcattgttctacgcatcttcgcatcttccaactcatgacataccaaagttcaatggcttcatccccctatccaggagggcaacacaaagatcgttgtttttccattcactagtaatttgggggtgtgcaaatagtaattctcctataaagtgtgcattgtcatctcttacatcggataaatagttccttcggataaaccattgttccgaccaaaagcttcccttgtcgactgcgtcaatacggagatctttgccgctttttaagttacctagtagtgctcaatatctcggcagcactctgttgtttatattgcttatatattggttatccctgaattcccttctccaattctctgaacatctcccgcggtgcactatcatatccgcgatgcgatagaaagctccgccgagctagctttggcttacgactgtgacgtttgtaacgataacgactattgtgaaccacccgcgcaagctgttccttatcgcgcgctggatgcgctttgcctcggtcgccattgtgtgaacaacccctcgatcttattctctttcccctcttcacacagcggccagccatggcttcctcagcaccgaagcgacgaatccccggcctgccgaacccggtgttggaagcggagcagcaaaaatggctattcaccgaggaagaattcgaccgtacaccatcgcgcattgataagatcgagcgtgggaaagaggactacatccgccaccgtgcagtcgacttcatttggcaagtgagcgtgatgttgaagatgcccccgcagacctcaatgaccgccacggtgtacatgcatcgcttcctcatgcgctattcgttgatgggccaatatccggagatggggtcggacctgatgcacccgaaggtgatcgctgcggtggccctgttcgtcgcgttcaaggtcgacgaggccatgcgccgcatgaaagactttgtcatcgcatgctgccgggtcgccatgaagcagccgaacctgattgtcgacgagcagtccaaggattactggaaatggcgagacctgatcctgcagaacgagagcgtcatgcttgaatacctctgctttgacctacaggtcgagtccccttaccgcattctctgggactactccatcttcctaggcgtcagcgacaacaggactttgcgccactccacctactcctttctcaacgactctacctacaccgtcctctgtctccaatttccaccccgcgtcatcgccgccgcagccctgtacgccgctgcccgccactgcaaagtcgccttccccgacgacgccgaaggccggccctggtgggagcagatcgacgtccgcctcgacgacctcatccgcgcctgcaccttcatcgtgaagatctacgagcgagtccagcaaagcctcagcaagggcttcccggatttcgcgcttccagactcaaccccccaacctaacgacccaacccgcatcttcgacaccgatcccacaaaatccgcctccgagcagcaatccatctccacccctcctaccctcaccgtcacctcagacacggcttcaaacggccgcaagcgctcgcgcgaacccgaacctcaccccaccacacagtcacaaccacacccaccctccccaaaaaacaaacccccttcaaccctcacccttaacgggaacgggaacggcgaccgcgatcgatcgcccaagcgccagcggaccatcactccctccaatgaagccgtcctccccacccaccaaaagcaaaaccctcccgccccctccaactcgcgcgtccccgcggcagcattatctcaaacaaaagccacgcctcaattcaaatccatgtcagtcgccgaagggaaaccggaaccaggaccggggtcctcctcaaaaccccctccgaaagaagagtccagcattgacgtcgaagaaggcgaactccatgaaaaacaacatgtcgttccagtcgcgcatcccactccggcggatgtggattctgattctcggagtaaactagactcccggaaagaggagaaagaggagggcgaggctgatgatgatgatcgtgctgggagtgaagaaggcgagatctaggagtttgggcttctcaggtcctgtggatatgatagtgggaggatatcgacatccacattgtttttgcttgtttaccaactttgtacttatgtcctgtgtcctgatttattaggtgtagacaaaatatcttatgaatagttctagttaatgtcagaagaagacgtacgattcaatcctagtttccaagtccaagtccatagccagacccaggtctatatattcgtagctatgctaaaaaaaaaaggcactagctacagtcaactatctacctaactaaagcgaatgattacagacaaacatcttcagtgtcgcgcggggaaaaagaaaaaaaaaagaaagaaaggcccagccgtgatttgaacacgggaatctccgcattacaagtgcgacgcgttaaccactgcgctactaggcctgcggtgactgattattttgtataccatttcttctagccattttgtttcttttctcccagacagaaaaaaagagaaggcccagccgtgaatcgaacacgggaatctccgcattacaagtgcgacgcgttaaccactgcgctactaggccggtcaaggttactgaattttattttagagacgttataaactaaccgcttttaaccccgttacgttcactattgtaaatctctctcttatgtgaggtgtacaattatcagctagactgggtctacgtctgtcatttcgggggaacttggtgaatgggatgcagtgtttgacggtaactgaaatcaaaaatatcaagcagctttggactacaacaatctcaaaccaaatttacctgttgattactaacaaacattccatcttttttagttactcaatgatcaaaagcggcaagaggtgagcaccaaagcagaaaggggaggtattaactatccggtacatatgacagagaacgtttcatacacagtttccgttaattgattttaaattcaatgtggtagatatattaatgaagccgcttggtaaatatcggactccgcatccttcgtacccaacaggcaaatttggacgcaacaaaacgaacacaaaaataaataaacagaaccaagacaaacaaataacaaaaagccaacttttgaatgtagatcggttcgatctcaaacgggaattgcaaggtgctcgtgatgaaaagagacaaggtcatcactagcctcagcctggccggacccgaacgactgcagattccatttctcaacaccctccacgcctttcagatcattcgcaaatgtactaaagaggtcacgattaagccgttcgtactcggagtattccttgggccaatttccaaggcgttcaaccgcaagtttgagcatatgcaaatgctgtcggacatgcttcccttcttccatgttttcgtctggactggaggcggacgaaggggatgagatgcccgagatgacatccatgtccacatcgctggcaggtgccgaggacgggtcaatgaacacacgcaaggcattctcgtgcagcgcggctgctttgcgatagtactggtaggccagcttacgccgactcttctgggtttgatagccttgagccacgcttgtatacatctgtgatagtagaatagtcatctcaaccgtacttggatgtcggggtccatggacacgagcacagttgtagacaagatcctccgcaagccggacagctccactataatcgctgatgagatagcgggtaatgaccaacatacgcccgagcgcaagcgtatatgaatgccgtggttgtgacaaagcataggcgtcacggctattccagagggaggtgagaacccaggccatggtgtgataatcctgttgctcatctagaaccttgatcaagcgattgatgtgttccagatccaggtgtgcgagctcaaagttgtgctccttgaaatattcgagagtatcacgaagaatcgtcgctgacacgcttagcatgtacttatcggccgagcctgctgggtgtatgtcattgtcttggccggccaggagaaggcccagcttgaacactagcttgagtgtcgcatcggacgagtagccatggtgagcaccgatgtatttcgtcgctgccaatgcgatgtggcaggcagattggtaatctttggagcgaagcagctggtctacgcgattgtaactggcgatggccactgaacgcataaagtcacgcgaggaatgagtgctgaaatattccagaactgtctcaataaaagccttagcctggttagggccgatttccaggttggaaccctctgtcgccaagaagaagctggtataccgatctgccacctgagtggcagtggatggacggccgcgattaagtaagaagccatgcaggcgggccgcggtttccgccgtgtcttgaagcttgccagtcttggagctgagggtttcccggaactgttcaaagtatatatactccgtggtgagggcggcatatatttcgttcaaggtagtagagttgtccccgcattcccggatgctatattcgaactgagcaaggaaagcaagggttgaccgcccttttgagctccggtcaaagccgagagcactctcatccttggtgtccttggtaataacatgacgatatatctcgtttgagagttgctcggccttttgaatttgaccagctgcgatatagccagatgcaatactcttggccgccgcaatcaacttgatagagagcgtctcggtcgatagcacttgcattgctgcttcctgtagcagcgaaacagctgcctgtgccttcccttgtttagtgtagagtgagactacctcccccatctgagatagggcttcctcgtgggcccatccatagctggatcgaatcgacgcgagtcgttgggtatgaatagacaacgtcttctgtagctcctttgttgacatgttctcaacctttaaagtagtgaaggctgcactctgctgctcgtggattgcatccaaggtggcacggatgtcttgatagtcgatttcaacttcactggatttaatttgcaaaagctcttcgtagagttggaccgcttccgcttcgaactgctcggactcttggcagatatttgccaatgtgttggttgcctgtatggtgatcgacgcgctcgcaccgaagagagtaatgcacgatttacgatattgcactgtcacatcatgaatggtggtagtgtcactgtgtgtcatttgcagacaatgaacataacgttgatagatggtctggacaaatcccggatcccgcaatttttggctgatctgggggctctgcaaggtagtgaacaacatccggcagggtttcagtgcgtccgcgtatcgattttgcttcaagagctccgtcgccacgataacaagtggctcgaaggcatccggaggacaggtttcccagcccttgcttaggacttgaactatctggcgataataatccactgcgatgggttgcggggccgtcagctcggccagggtccagagctgtcgtatcacagtgggatgctccccgccgaaccgcttagtataatcatccagcatatcctggtggatgttcacgacttttccggtctgggaagtacgctcgtatagacgaagaagattcaatgtggctcgctccacagtttgctcgccgcacactggccgatcgcgtcggactgcactataaagccgggtccggatatcctcttccttgaccgggtgacggcggtagcggtagcacccagcgaggcgctctgcaaaatcaacgcagtgctcaacattagttgatggcaggacgaccttttcgatcgaagccgcaaacaacgacggccacatatctcgaaggactcgtttcaacacccttgtagcatcatgccaccggtgttgagacaagtacatttcgattagcgctgtgctcgctgttgcgaaattttgctcgtcactggatgaactagtataaaccatttctttcagggttgactcggtcagcagagattttgcagatgacgagtgcatcagttgccgggaagtggactggatatttctttccacttctttgcgggtggcactctggctgctagtactttgtgcgcagtatttgaacacttccaaggccaacacagacagtcccacttccttcatgaactgagcaagctcaagcaactcggacaccaaggcttcggcactggaggtggttttctcatactcctcccaaaccccggcaaggatcgaggccgcttcgttatctctcttccgacttttgaggaatttggaatactcgaggacagtccgcagaactgacaccttgtgctcagtggagtgactgagccggtatgcctggctggtttgctgccatagctcaaggtatgtccgttcggcgtccgagaagtgaccctctgccctctgtcgctccgctttcgtcaggatggtcttcaaatcaaatgaatttgtaatcaactcgtccacctctattccagtcaaatccaggggggtgcttgtctctggcatcgtgtgtttggggccgtggaggtggactagtaatgactcgtccatctgcacagatccgctccgctggtgcgtactgttgacgaaggacctctccaaattttcattaatctcctgtactttgcggtactccttgaccagactataatgctcagacagctgcgtcaacgtggatttgaccacactacttgtcgctccgtggtggaccttctggcattcaaccagcatctggagaatctggatgcgccgtgtcatgacttccgtgacagagtcagtcattttatccacggtggcatccaggaagaactgagccatctgcatagtgatgagattccgtacagacaagaccttctggcagattgttgccgcctcatagaagatccgactactctcggcaggcacgctgttgctaatctgtcggaaaaatagcgcctggcagattacggcctgtacagtggctggatggttgttgctcaatatttggcggtacagggatgtctgaacctcatgaatggaccgaagcaacgaagtcgccttgcttgcccacaaagtcatctccaggagtggcacagagggggtcgcagggagaacagatcggaaactcttgcttgcgatattgatttcttggttgttcgtgcatttgaatgcaatcttcgcatagcctgtccagtaacgaagcgcaaaatccaataagggatgtttcctcaacaagtcttccgtcacctgcccattcagcggctccaaggatggcccatggctatcagtcacagtttgctttgcgtacagtaggagtctctgtgcaaaatccacatgcctgtccttgatcgcgggtagaaatttgcccttcgagaatacatcgaggatagcggtccgcaccagtgcgtgtctaagatagacaaggtttttgtggaagaaaaccaaggaagcgaccggcttcaatagctgagggaagtcaatttcgcgatgctcggcgagggccgcctcgtcaggcttggtggagagaagagcagccagttcctgctgggcgaggggacggttcgcagtgactagccagaccaaaatcttcttcgtatcctcgcttagcttggactgtaaggtgtgggatatcagatccgagatcttatgtcctgcctggacgatattttccaccgacttggaaagcgcggcctcgttcggcgggttctcatcgcgcacacgcttggccgccagcttcgcccaaaggaaagagccatccgatgcttccacaatccgagcaacggtcacctccttgtcttcgttggacattttgctatacacatggctctgttgaagggttttgcgggtcaccgcgctaatgtcatcgaagattaagcctagggtgactcgcactaccatttgggaggtgaccgagtccactgggtgggagccgagtgtgatcaactttaaactgggggacttggatgccgcttcatgaagccggtgtgacagggccttctccccacagctggcctcgtccacgccgtcgacgactaggactagctctctggaacctgctccactagtcttgagagcacggcccagggcatcccataggagattttcatacaactcttcgtccacagtcaaccggctctggttgtaagcctccgccaagatttgatatagctgcatgttgccaatgcgcttgctcaacatctgcgacatgatcgtcttggcgacggctcccggggtggtattggcagggattcgaccatctatctcggctcgttagagagtaaaagttttgggttgaggacaatgaaactaaccgatagatgccaatatggacatataccttgttcctcctacgggatactgcagataatcattgatcacagttgacaaaaccgtcttgccggaacccgacttagaggtgatagaaaggacctgcttttcgcctttcaagaatcgcatcaggtatggcttcacccacgtgcaagtggcctcctcgcgctcctggcccgagggggccgtggcttcggtgatatgggcaaccactgggtcttcgggctgcaaccagtctttcagggtattgattccgacggctagatttatataataagtatagatcacatggctttgggggagcgagtctacctttatctccctcgaggccctctcggatcaattgatgacgccacataaggtctgaaatgtgctcacaacgaccacgaaaactgtcaatcggacctgggaaggtactatagatatcaatcgatacccattccgaggcaaggagtgaccgatgaaagtgcgtggccacacagacgacgagagtaaccagatcagctaacgcaagaatgagctggtctttgatatctgaagagaccacaaagagctctgcacgatcgagcaggttgcctagaccagaagagcagcgatagaaaaatccaaataggtccataagggccggagcattttcctcgcccaactgtacgcttgtggtcagtcaatccgatttagtgggcacgaggatgtggcttctgctcacctcaagcaagctcgcacagtatccataggataactgggcggcgaggtggctgtcgccggcaaattgttcaatcgctaaatcaaacgaatgcacacgctcaatgaacagggccgcccacacaagggcattgtcgtagccactcccctcgggcggtaactttctcatcctctcgcaccgaatccactccaacaggctagcatagtcagtatcggacacccgagaggccgataggtcatcgctgccccgacgcgcaagcgagttgactacatctgcgagtgtggtgttcttagtggtttgctggtattgatgactgaaactcttctccctggctacggtcgcgtgctgctctgccatgttcgaagtgggtcgcagaccgagtagcgaagtggaggacaaagatatgccatggggcactgaagccatgtctgtgtgcatcaaatatgatagaaattatgataataattaggctcggttggatcctaaggaagacattatatgtcccggtttagggaggaagctcctcttccttgtactcttgttctctccccctctctcccatgatgctgtactgctgtaccatgttgtgattgtgctgcaaagtccaagacgtcaatataagctccaaccgatcataatcgcagagccaaaacaagagtacagcatgtctatggagatagtatctattttcgccactaataatggcatcatttagttcccgccgtggtctctgtatggatcagatcactcggtgcctttcgtgtaatgaaatcataaacaggcaagaaaacaagcagaacaggtatgtagccgaaccctcaaggggttaaggtttccgggccgatcctagcaaaaccaaatgtgtcattgcattcgctgagaacggttcttccacggttattgctagacggttgcaattgataacataagaacaaccatggatccatctacgggtgtgatgtaggatagatgcggggaagctgcgcacttttcagaaccagatccatcggcatctccatgggccttgcgccgccaaatctaaatcattaactaccagggattgtatgtcgtaggtttaagatggcacacaattaaataaaaatgaggtgaagatgacgctgtagtgggccacaacccaacccagatagcccaatttgaatgaaatgactttagtcgaaacatggaattgccgcactatatctcccttgtggccttccaaaccccggacactaagagtcccacggggaattaaggttgcattgatatgcggggacggcattcatctgtccccacatcccgctctgccgctatgatctcattctcattatctacatctcgggacagatgctgaataaccatgggaccgtcccaaaaatagttgtcaaccagacgatcattaggattccgccgcggttcgcttgattgtgacttctagtacttccgcgtcttgaggcaagtcggccccatcgtcattgttgtcgaaatataatctccacagatcctggctattctccacaccaaccacctcagatatcttctcgtcgtccggaacccgcacggccagccaaccttcccagccctctagtgtgatccgctcttcatcttgtgtccaatcgaaagggccacatatgtttccttcgctatcctgtttccctccccatcgtagctcatgggtctgcaaatcaacataaacccaacgtagagttggaggcgtttcgcctgtgatggtcacaaaccccgatgtgttatcaggggggaaatccggatgttggtagaaggaaccatttagtgggacaagctgtgaatcggtagatttggtgatgtacatctagattgtggtcagtgataggcagactcgatttcggccagcgcatatgcaagggataataaaatataaatcaatcggtcgtatgggaactgacgtgcctttttatccgcgcccaagtatactctcgcattatgaattgccaggctttggggcagtaatccatttgagggcatgcattggactgaaaggtaacagcgctcttgacgcgcactttcccgcctgcgctcttcatggtcccgcgtacccttggaagcctcgttgactccaatgatggttgggaccatcgcggtcatcaggaaaatgccaaataccatcttagttcaaggtattatgcagtggcttcgtttagtatgaacattggttgtactcgtaagttgtttctggcctttcgacgaagtttccagcaatgtactctagctagctatgccttgcacatactgtggcaagatggcttctaaagccgtcgatctatttgacgtaaggaagaattgatcaaagtttatcttttttgattcatagcggcaacaattcccgctaccctacaccaggacctagtcgtcaacgagaggttaaggttctcattctgcaaacggctgattgtgtcctaggagttgaagaaaccatggatatgtgaccatatcatgctttcaatatctctagggttcagaaaattagttcatagactaatactgatgagtgtcattgactctctgccttcttaccatgaagggtaccatgaggagatatatatcgcaggggctttctcctcaaaaaattactacgcaagtaataatcaagaacaattattactacagcctaagcagtaagttttatgctcaaaatattcaaccttttaacgcatggttcaacaacgaatttcgaatttctgatgtttttctccagttcttaccctgtggaagcaaattacgagaaaatatgggagaccctgtcccagcgttaaggtatatcaaatcccagtttatactttataccctcatactactattttctatgcaacaacaccctcgtttaccggtcccggaggctaaccaggcattcaaacggtgcagtgccgcccctgcccttggtaaaggaaagcgtaggggccgcgagggatcagaaacctcatcttcgaccaatgacccaattgaggatctggtggaacctgacactctggctaatggaattcccctgattggacctggcgccgcccgtgaacttgacagaagaagaaaagatgacaacgaagtgaagaaggacaatgataagggtagcctgaacatcaaaatccacctggacttgcatgccaaggtgaagttggatttggaggctgacatatatggagatattgtgattgggctactgtgatggagagcgttgcgggttgttgttacttatcaatgcgttagttaattacatggtggatataccgccactaggcaatttcaactgtgaatctcgatcacaggacttcttccataatctttgatcgtactttttaagaaggaaagccacaacgaaggtgggcgtctatgtttatcctcttgctagtttgactgtgaagtgcaatatgtatgatcctataaatgcctgattctacaggcttgtttgctagtttgcttgctagctccagcaacctaaagaccgccgaagagaactcaaatataggaagagctctgcaagctcggctacaacggcagtgcatcagtgaggcatgatttaaatcctctaagtgcacatttcgggctatatatcgaaacaattggtcgcttggttggtagaagttggcgaactgtgagttggagtaagttattacagatagggcattcggatatgagaagagaaatgtatgtagtgaagaggggaccctgccacaggggacaggggcaccgacagccttgtctgcaaaacaggtgtgagagcagagacgacgagcgcaacgatcggtaacttaccgcgtataattgcggagcgaagcaaagcaattaaatcataacctcgtgtgcattccacgtgaccaggtcttttcattggttttaatgcggtgaagaagtagccggctaactttggcagaataacccaaccggcagaataaatagctagggagtggtcaaataccaccaagacctttttaggatatgccatggagcatttttagtctagcggtattgacaaagcaacgctgaaaagggggcttcccttctcgaactcaagttattgaactagacctgcaacacgatatacatactttatcctgcaaaatggtaacatctaacaaatcctgtgactggtgctcgacagataggacaggtctctggtgatttgagatttcctgcgcataaatcgcagaccatatgtccacatagaattgtcacccagcggtctggctgcatatgatgatgtatcgaccacttcaatacctaggtgattgaattaccttggaagagggacttttggcggcgattgggcaagaaaagatcacttccaaatggcgtacaaagcttgatctcacccggggctctttcttggattcttccctttacgtgaatcacaggctcacacaacaccaatcagccatcccgacggtaccgagtaccacttcaaatctccacgatggcgtcccaacacattcgggtagccacgccgccctccagagacgccatcctcgaatccctcgtcgaaaatgtccgcgccttcaatgcgcgtctaccgccaggacgcgacaagatcgtctttggcgcgtgcgagctcgaggcggaatgccgctgcttctcaaccggcctggcgcgcccctcccgtgtagggagcagcccgccgagtttgagaccgtcaacggccacttttcagcccaaatgcacgctttcttcaacgcactgcacgacctcgaggacatggcagacaaaccgtcctcggacgacctagacctctgccgcccagacgaatgccttcggcccgtcatatgcgtttctaaccagtccgaaccctatctagactgcttgcaccgcaccttctacactcgctgtcttaccgtccagaacccggacagcctgccctgcctcaaacgcgtcactcacgctcaactgcgcatcctccccgaccgggatcctacctttcacctaatcaacatacggcctgtctccttacgtatacctctcgacctcgctacctacctccctcaactccgcgagctggcctgcccctggctataggagtgccttcccgttgcccttatatctaaggtactgtgtataatttcccgtgtctgggtaagtccttggcgcgatgaccgcgctgagtttgcgtgggctatacgttatactatacccttatggccgtcctcccttactaaggtctatctctggttctggagacctagctcctattagcacgaggtagactaagtaacgtagatacctaaccttactggtatattatcattgtcctcgactaacgagtttaaaggtatgaaccttatgtctcttagcgtttgcctcgtctctgcaacgggaaaatatgcccgccctttgagacgctgagctatttacgtggcttaggtggcggccctccaaggagagggcgaaggagtatgaagggagtgataacgtgcctccaacttcgtatgaggaggagatggttatgcgatggggggtgagatacgaggcgcctgccgttggaggagatgggaaggggaaagtgacatggcaggtcggtgaggactggaggccggaggacggagtcatcaaggcgtttgaggaccttgtggggggagacggggagaacatggagtggaaagcgtttgagtctttggaagaaagggagcaggatccggaggactgttaggaaagaatctcagccattcaacccaaatgacccccctccctcgaatcgtccattctaccgacattttcgatcggcactcgcggtcagagaatcgtgagttcgatccgagcctccctattagcgcctcaacaagagagaacttcggttctcaaacagataagtctcagaccgtggattcaaatatcctccggcatgaacgaacagccagcgatggggacgatctgtgcgactctaatagcccataaggaagggagaatatccgttaccaggtcaaaaatttcccgacaaatagtatcgtccgccccctttgttcaaataaacacaaacaaggaccagcaggcttagagatcatccaatacaatccaaactatatatgcagtgcatcagggagaagaacatatggaggggagacgcgagatagatggctatctaaactggaacaattccttgcgaaaatcccgtctctagaaagttggacttatgatcaagggctgtctcgtgatcaagttttgggtctgagatgcagaaaagtacttggaatagcggatcatactcatacatcgatttgtcaggacacggaagcctggtcacgacgacttgaaggggatagcattattccagttttgcaccatgatcgcgatctcactatgaatgtgagcgaacaagaagagagctatcacaaagttgcatgctttccagagctcatctttatgtcattgtgtgcggctgcgtcccagacaagtgagaatacagccagtgtttacgaagcgatgcgcttatacaagaacacaaatcctcgggaaaagcactcgaagaagcttatacgtggcgcaatttgggcaaatcgctcgatcttcgctttagcagagactacatggggcccggagtgctcgaatgcattcttatttggcaagtataatatttcagatttggcttttatgcaagagctaatcgcttcaagccggagaatctgtctcctcctttgcccgatacgcggagcatgtcaaaaagcggcaagaggtgagcactaaaacggaaagagaaaggtctcgagtgccaggcattatccggtacatatgcgtatgcgtgtgtttaattaacgagaaggaagaaaactccaagcagatttgcgatgaaaaggacaactggttttgatcaggtgatactgttttgtatggcttcaaatgttcagaccaagacaagcaactggacagaaaacgataccgagccatgggtgatatatgaaaaaagcagcacgccgggacaccttgatgcgaatatgttcgttctcttcgttctcttcgttctcttcattcttctcggttctcctagtcaaatcctcaagctcggttcaatagccagcagtcataacccccatcccatgatccagcaagctgctcgaagcaacatagctaaacccaccgaaaggattactctcagcagcgaagtcgtcgtcatccgcgccctttccagctgggaaatcctgtcccttactatagtactcatcaaagccgccggcagtgaccgtcgggctaagcgggagatgggtgaaatcagcggagaagttctcggcgagtgcggggtccgtgacgataggctggataggcgggtcgagctcgcggcgctcaagagcagcccagtcgattttgcggaagaagcggtgcttcttgattatctgcaggtccttctgcatgtggtagccgaggcgcttggagggttctttgcggagtagacgggtaagaaggtcctttgcgtcgggccccaggaagtaggggagcgtgagcttttgtttgacaatcttctcttgtaactttgcgtggttgtttccgcggaacggaggtgagccggtgaggaggtcgtagcccagtgcgccgagggaccaccagtcgcatgcttttccgtacggcttgccttggatcacttctggcgccatgtagtcgattgtgccgaggagagagttgcagcggtcgtcgtcgctaagcgcgatcttgctgagcccgaaatcggttaggaggaggtggccttgcgagtctaggaggcagttctcgggcttcaggtcgcggtagagaacgccgacgttctggtgtaggtgtgctagtgcaagtaccatctctgccatatagaaggctgccgtatcttcttcgaacatgcgttccatggctaggtggtggaagagttcgccgccttgcgcgtactccaggatcaagtaaagcttctcgtggtcttggaatgcatagaatagcttgacgacaaaggggtggcggttgacactttccaggattgtgcgctccgtcttggtctgctcgactagctttttgtgaacagtgagggaggccttccggaattgtttctgagcgtagagcttgcccgtgacgacgtggcgcaccagtaacacagttccgaatgagcccttgcctagacaaaggagaggcacaaagtcctccgctgtcatcttgcggcacagttgactacgcaactccgcagtcatacctgggacatccgccttgcgatcgtccagtatctctggttgaacagcgtcggaactaacaaagtcctgatccagagggatttcatagctagtcaagatttcagtgtggtcgctatcggagtaaaaactggcaacactgggggtcttggagacaagtccgcccaggccagctgtgtcgtcagacagactcaaagtgttaagttgaagcttcaacgcgctgaccccatggcctgtggatgcctgtatcagtgggctagcgccgccaagcgcagttggagggcaagagggagcacgtgagctcgcggcggaaaagtccgattcctcgtcgccggatgccagaggggtgaaaccgcgaacagttgcgcacgccggcccgaattggttcttcttcttcttccgtttttgcttcggcaacatgttctcattgagagtctggtttgtatatccattgaatcccttggttgtctgctctggaggtgatatgcccatgtgtgcattatggcgacggtgattggctgggatgtcaatggcggactgttcgctgtcggcttgcggagcgaacacgtccccgaccgaccagtcgtcagaaggcattatgcttttgctataatagctccgcgagggaagcgaaataatttaggcgaaagcgccggcaataaccgcagggtcaataattgaccttgcgcggttgtaaagaacggtagcaaggtattcagaatacctattttgcagtcgctgttcacatagagaaacccggttagcctcgatcgtctcaatcttagatatcaactgtaaagaatgaatagacgggtgggtgagggttttcacgcccccactaattatcgccaaggtaaaagtaaaaataacaaaaataaaataaaatcggaaatgaaaggccgatcaaggagacgtacttcaacttgcggaatttattcaccaaagcacggttttgcttcaatgtccgaactagtcaatagaccagcctcgaatctctcgagcaggtttaccgtccgcccttcttcaggacggacctaggacccctagccaagtcacctcgctggccgaaaagtcgaaggccaaggtgaaagcagaaagcgctgggtttgtcgcgttcgagatgtcaggaggcgagtttagaagggatggatatagatcaaggttggctagggagccagtaagcgaaatcaaagcgagcgaagacgaaggtacagataggcacatagaggacgaggattttggtaaatagagattaacagtctttcttccccgggaagtgaaacaaagcaagaaaagagcgagatcgtgcagaaattcggatttcgcgcagatccgggggctaagcgactagtcccaatttggatttcacgtgtcagatgctgacattagcatgatcttattggatttatatgttggtattgtcttgatatgtcttgatattacagtctttttactttgactagccctcgatatcttgccaagtgagacaagcctcaatattacagccaccaactcgcatgactgtcgatctcgcatgactgtcgatctgcatactgcagcctcctgtgtaacatgaaccccttcacagccctaacggctattgaagaaatccttcgagcgagtaatctccacaccagaccgctggacaaaagcaagagcacttggcttttccaccttaaccgtcacatgctcattgccaaagtcgacagtcacaatgcgagcaatgaaagtggccaaagactccacagactggaaatcagtctgatcaaccttctataatatcaaaatatgtcagcaaataagaccccagaaaaatataccaacaaatgcccagagagatagaaccatacctcagccacagcccgcgtcacagcctggtaagtatcaacaacagccgacccccaagcaagctgcccaggaccctggaacgtaagaccaacaaccacagcctgtttctccagcctctcatgaggattcacaccgaggatagcatagcacctaataccctcgatgcggaactcctcctcgagaaccaccaaatcgcgcgcctccccaccagcaccctccttcccgagcgcaataaccccccgataccggagcccctcatccgcgcgcaacaaagccttaggcaaatgcagcagcacttcgcactccccatacgccgccgagatagggttcggctgcttctccgccgtagcagccgacgtcgtctccaacagacctagtccggcgtccgcgacaacgcccgcgaccacgcgcagatcctggcctaggccgcggctatgcatgtcctcacggcgcgtcccctccagactgatcaatcgctgcgacgggtgcgatgcggacgaggtgtttacgcccatgttgcgcacgtcgctttctagtcggcggaagagcttgccatagtcgagggttagggagacgttgtcggtttccgcggctgtgattattgaggagtaggagagcttgagggttgcagtgcagggttgtgattttccctggcggtgccaggcttctggggcacaggggagggggagctcgatgtcgcggagacggacgctgtcgagcacatctgggcggggtgggagttggatgggtcggtcggtcatgattgtatttgtcttggtggtttaaggaggagatggttaatgcgaaattatcaacaatattaattagatcaagggaaactgagaggggaggtttttttttggcggggcacccgtggatggttgtagatcatgacggtagaatccacacgggcatttccgttttatttgtcgcagaatcatagattagatggagactatcggtagtattatgggatattgtttgtatttttgttcactacacgtgctagaattggtttggtggagattgtgataatatatatctggtaatatatatctgggtttaacatggctccgtacccaaatttagatactaggacgttacgaatcgagaacccggaatattacaacaggagaaaccaaccaactaaaggaaaagattaagattttcggatgctaacacacatacgatagtccggggctaacaagacagaccaatagcgataaccgcctagcctccagccaccctaaagctaccagggaagaaagaaaagattgagcactcgcgctgtccagtcgtcaggaagaaagaaaagcacccggccgcaagaacgctgaacggaacctcggcaggtgaaaaagaatcatgacaccatgaaatcagtacgagacgttgcgggtatttggcgaaggaggtcaacaaaaaaatgatggtagaacggaagaatatgcaataaatccaatcaacgaagacccggcgccatctaccagtagcgaggacggtcgtaaggcacatactcgcctcttggtggagagcgaggacgaccataaccccgggcagctaggtagggatcatcatagtggcgagggggtgggggaggccgggcctcgtaggggtcttcgtagggacgacgtgggggtgggtagtcttccatccgagggcgagggggagtccggcgggcatagccatcccgttcatagtagggatcgcggcggataggaatcggcgaccgctcacggtagtgctcccgcggactgtagccacgtgggggagggatccggcggtcgtactcctccatgggggcagggtaggggcgacgtggtggggaacgggaccggtatgggtcacgaacggggcgttcctcaaagttctgaatctgggatttggtgagagggggttcctctaggtccgagccaggttggacgcttacatcggcgacacaagatacgacggagcccttgaactctcgctggtccagtttctccacggcggtcttcaggtcgttggcggtttcaaattccacaaaccttgttcaaatgtcaatggattggaagggtctcggaatacaatggttcacccaccctctgccctgttctcggccagtttcagagtaaacaacgtccagtccagactggcgggcgaagtctttcaagtcctattgaatgcatggtgagtccaggtccaggaaaggtatgtccggtaaatgtggtgagagaaaatgtaagcactcccatgtccagtccgagggggtgtatccagaatggccatcttatatatccaaaagtcccaagaaaggttccatgggtctgacaaggtgtggtgagtatgcaaggattaaggagcaattcttaaatctcaaggtaaaagaaaaagctatagaagcatttctcggttatcaagagaggaatgataatggattagtactcgatccttggctcaaccgatggccacaaggacaatggactggaagcatgtgtgggctgaatagagacgggtttgaggaatatacgtcaggaactccgggaaggaatggacttgctgctaacctgccaacttgtttctggaagaccggaaatctgcatgcggaacatagtgcgacgtggacgagggagcgcgttgcggtcaggcggtcccgggaaggcttccttgcgacgaggcccgcgcgcaaactgaacggtgagtcgctcgcctttgaagtcactgccgtctgtagtatggataagcgaggggtcattgggtggaaagtcatgggggggggcatacggaaggctataagaaaataatgttagcgactttgcgcgatgaagggaatctgataagccattcttaccgggcacaatatctctggcatccagctggtcgtcgtattcgatgaagccgaaaccgttcatcaatttgatctccgtaatcttaccggagccatggctgctgaaatgttcctcgatgtcgcttttggtcactgtgataataaagcagaaagaggttagcgcatcatttctccaaagtgactccaaaagcaccggttaggtggccacccgaggcgctgttccatgtgggtagcattccacatgagcatacgagaggtcagagcacatgggactcagaggatcagcgaagcgaccagattatgcacggtggtgcgtgtgttctccaaaactcagggaagagggacagtcaggtaccagcataccattgcggggaagattcccaagataaaggcgggttgaggatacctcagtcatggctagtctgaagcgattgatgagcgaggatagaagggaacctggctaaggcgaatcctagagaatatggatgagatcgaaaaggcgggagagcagagagaagttgtcagttgcggtctcgctgcaggaaagcgtgtaacgtgtaacccgacaaacgagagacgggtagagggtagatgtactgctgcaaagtcaaacggctgaacagcagaacagcaaaacaaatacaaaagataccgaagcgaagagcgagaggggaagaaaagaagaaagtaccgtctggcggtggacagagggtggccgcctcactttttctgatccacgtggttccaccatagtaaaaatagaggaagagagaatatgaaacagtgattactatatagagcgattaattagattacatgtactagctacaatacaaatatatacctccatagtttaaaggaagtaaggcttatccctcgtggactctctccactgtcattccacggttctgccaaccccatggggtctttttttggttaacctgtttttcctatttgaaacatctatatgtacatttggttctcgaaatccaaccattctatattaaagcccctggttactatcatgggatcacgtcatgacgtacttgggcccctctccaccttgaggagtcacccagttaatgtcttgtgtgggcaccttgatatcacaagtcttgcagtgaatgcagctggtagatagttagtatacctctctatccccacgataattcaaatcgagaaacttacttttgtgagttgatctggaatcggaccccgtactttttgctagggtcctccacgtattcgtagacgcctgcaggacagaaccggttttcaatacccttgtaaaccggccatgagaggtccgtatgtttatccatgtccttcacctgcaggtgaaccggttcgtcttcctcatgattggttccagtccggctgacactggtcaggatatcgaaactgatcactccgtctggcttggggtaaacgatcttctcgtattcagaagcaggcctggtagctgctgcatcagtgccgtggtggctgagcgtccagggcacccggcccttgaacaggtaggcctccagaccggagtagagaagtcctccgaagaagccgaaaggggtgttgaatgagggccggatgttccggacctcggaaagttccttccaaatggatgaatcccgtagagatttctcgtagtcaaacaagaagacggtgccttggctctcacccttaagcgccgagtaggcagcctcggcggctaacatgccggatttcattgcggtgtgggtacccttgattttcgggacgttcaaaaagccggccgtgtcaccaatcaaggcacctccggggaatgcgcacttcgggatcgactggaatccaccctcgttcagtgctcgggccgcgtaagaaatgcacttgccgccctcgagaacctccttgaacatggggtggtgtttcaacttctggaattctccatacggcgaaagccatgggttcgggtagtccaatcctgtcaccagaccgatactcaccatgttatcgccaaagtggtacatccaggctccaccataggtatccttgggaagagggtatcccatcgagtgggtaatctcgcctgatcggaacttctcgggctgaatctcccagatctccttgattccaagaccatatgtctggggctggcagtctcgtcgaagatcgaatttcttcatcacctgcttggtcaagctgccgtggcaaccctcagcaagaagcgtgatgcgggcatggaactccattcctctctcaaatgtctccttgggcttgccctcccgagtgagtcctaggtcgttggtcgcaatgcccttgacggagccatctgtgtgatagaccacctcgctggctgcgaacccagcgtacacctccacaccaacctcttccgcacgctctcccagccacttggtcagctcgctcagactgataatatagtttccctcgttgtgcatctggggcggggtgggcagcgggtacgagccagtcttcgtcaggaagcgcatcttgtcgcctttcgcgggagtcgcaccctggaagcgcgaagggttgtcctcggccagccagtcgggaagcagctcattaagagcggtcggttgcagaacgtttccggagacaatatgggcgccaatttcaccggccttctctagtagaacaacgcggaactcatcgttgcctgcctcgttggcaagttgcttcaagcgaatcgcggcggcgagaccggcgggacctgcaaaccaaagcttggttaggatatatacttggagaaccaatgtggcaaaaaatcacataccaccgccaacaatgcacacatccacgtcatcggactccctgtctaatgtgcgaggatcgaagtcgccattctcgtcggtgaagcgctttgacagcgattgcgaaaaggctcgtgtctgggttggcgcggtgaatagtggtgttcgccgagctaaacgtcgcccagaaagtgtgaagggactggctgtgtgcgctggcgtagcaatggagacggaggaggtagctcgtgcgaagcgggaggatcgaagttcacgcctcaatagaggcaagacggcaccttttgatgccatggcggtgtaaatggttcaaagatcggaggctgagacctggattactttgcgaccagtaattgagctgatgcggggactcaggatatttacgtcgtagatcccgagtgtctccagtacccgagttctgagtggaagtgacaaaaacgccgaaaaaccgcctggctaccctcggctcacttctttcagccaataagcagctgggcgattatccaacttccaggcctgaggcagccatggatggatgccaccgcccgaagtgggaatcgccactagccgacgccgacgaactggtaggagctgggcggtttctttagtatatttagaataatatgcactggctcaactcttatcacatttatgcgccgcggcttgactgaacttggagcccctggcggtatcctagtatatttacggagaagtataagtagtctgcaatgcccaattctcgtcacgtttaggcgcccatgttcaatacgatatagatactctgagttgatcacatgcatcacatgcttagcttccttcacttgtgatagtgaaacggaacaatattggcattagctctagacttattgaaattgcatacatatctatatgccagaaacaagcttaaatacccgagtcatactgtcaaagcagaatgcagtttcccgtattccgtattattactacatttcgcggaatgtgacgattatgccgcttcgggtatggtattcagcatactataccataccataccagcataccggaatccgctagaaaatgtaaaaaaacatgtgacctgagagttgagaataacaaagtctcaagaactgagttggtatctgtatgttgtatgttgtatgttgtagatgaaaatagattgcagggagattccaagaagttaaaaaaaagaccgatcatcgttagattgctcgcagattgctcgccatgagattcatccagccttggcagacagtggatcaacgccgcgggcgtcaaaacggccacctgtcctgatcgaaatctctagggagagtcattgatatgaaaccaaaaaaagtactccgtatagtcggatcaaatataatttccgagcgatataagctcctatcacagtcagtttccaacaagatccggtataatgaggcgattatagtgaatccccagtgtagtgaggtcagagagtaggggaggaaacaaggcaaaaaaatcagaatttttgttcagttgccatccgttaaagcggcaagaggatagcgcgtcgtacatggagtgaccgaggttagtcgatgacgatgattggactggcatgggacggatggactatcagctgcaggaggagcgcggactggcaaactcagacctgtaacccatggcgccgcggaggataaagcaagggtgtttgagccagtcaggggccgatacagagagattggcggagtgcgctgggcgaatgaaagtgaccaacgatgttgtgcttctgtgattggctcacagggtggtttcccagagccgctagcgggctctgaagccaaggttgaagggaccaaagtgccgctgctttaaccgccaccggtggcccagcctcccctgactaggctgtgactcagcactatataaagacccaacctccccccaatttaccgtgggaattttgtctcggtcttggcggatcttatttcggaaatccttcttccctccgctcctctcaaaaagcctcttgattatcaaattgatcttgatatctgctggctttctcttactaatcagatctatctcacccagatctttgattttcgagacccttgattttatcaaagggaaaaaaggtttcttggtccacagacctaaacgtccatagaagtcgagcctcaggcatcacttcaccactctctctttttcagatcgtgcagatagacaatcccattttccaaaaaacagggcaaaacattttcgaaagaaacaaaaaaaaaagtgccgtccttccgtccataatatcgccgtcgcgcctatcttgagaaaaacactttagtgtgatttttttctcgattcgttcaccatcgactgcgttgggtttcgttgcatatactatcccgtggctgtgattcacgagaggttacgtgcgaacacctcgtagggggatacattgagttgtccatctcccaggtaagaagctccttctgtttgtgtttgacgttgtgccttcctttttcttccttccgcgttctttccctcgacacaccttccctattgatacgttctcgggaatctttccttgttgatattttctcttctcctcacgtgttcttcttctctccgctgctctgtcacgcgtcgttttttatctcgcgacttttcgcgactcgagctgacagatcttcttgatcagttccatctttattcttgtcacaactcgagtattccatcatggattctctcaccacccacccctccaatgcgcagcaggctcgtgccttcactgccacctcgtcgctgtctttccctggtggtgctggggatttgaccccgcctaactccgacaaggaggccttggcaatggcacagggcggaaatggtatgaatggccagcaggccggagcaaatgccatccatggcaccggggtgactcccgcttcccctgcgacccccgccgcgacccctggcgccactactggaagcagtggcattgtccctaccttgcagtgagtatactctggacgtttttctgggtgaccagaatggctgaactagttattccaaaaggaacatcgttgctactgtcaaccttgactgccgtctcgatctgaagactatcgcgctgcacgcgcgtaacgccgagtacaacccaaaggtatttattattcctaacattgctctgagagcgcacgcatcagggtacaatgtggctgaacttggttctctccttagcgttttgctgccgtgatcatgcgtatccgtgaacccaagactaccgctctcatcttcgcctccggcaagatggtcgtcactggtgccaagtccgaggatgattccaagctggcctcgcgcaagtatgcgcgtattatccagaagcttggtttcaacgccaagtttaccgatttcaagatccagaatatcgtcggctcctgcgacatcaagttccccatccgtttggagggactggcctctcgtcaccacaacttcagctcctacgagcctgagctgttccctggtttgatctatcgcatgatgaagcccaagatcgttctcctgattttcgtcagcggcaagattgtcctgactggtgctaaagtccgcgaggagatctaccaggctttcgagctgatctaccctgtactttctggtatgtcttgctggattcgctgccaaacctttactgacttccttcttagatttccgcaaggtttagaaagttccagggaagatcactctatgcgtttcaaacctgtattaacattgctttttccctttatgaggacagtcgtctgaggtctgtccgtatctcgcttttccttcggttattacgactcttttcatgcaagcatagttgggcgtttttagcgattcggatgatccccggttttctcacactttcgcgttcttccacacaattagattgctgcacaccgcagtgaggcggttgtgcgccggtcgatgactgcctcgatttaatcatttatcgttctacaatctgtggaggattttattcccacgggccaaaaaaattaatggtgacctaaggcagtctgttagactcagctccgtccttgttttcccctccggggttgatggaccggctttttgccgtgatactaccttttgagtagtcaatgcaaatgtcttaaaaaagaattcctctcgtactcgagtagatgtagtttgtagctcaagccttgatctgtttatagtctaaatgcctttctttatacatccaatgtctatgctatatacatctcatggaaggatacttccggtctagagcacactgctccgcgaagccttccttgtcttcgccaactcgtctttcagaatcggtctcctatccccagatcgactaccatcgccatcaaagtcctcatcattcgacacagcaacctcgggccaagtccacatcttgcttaactcggaatcaagcgtgccctccagcgcatccacaaccttgtctccaataacagggaagaacttaaacgcgtggccgctaccaccggtagcaaggaaaagaccttcatggtcagggtgataagaaacaatgaagtcacccgtgggcctgttcaacaaaattagcacccagtccacagacaactaaaagaccaaactcacgtatcagtataccaacaaaccctcgtattaacaaactccctctccgcaaaacgcggcaacagctgcctcaaggcaacgcggaacgcatcctgtccttcaagcggcacaggtaccccattctcaggcagactaaccaccatcgagccctctccagcaccgggaaccggcacctcaacgggattgcgatacccaaacgcatggcgcgcaatcttgagcagattatctcggggcgggataataaagatgcccgtcgcgaagttcaaaatcgtcggcaaattctccagctcgcgctgctcctcatccgagatgcgcatataagcaatcgcctgtccggtcgcaacagcccggccgcgcaagtccaccagcttcgacgtccacgcgccagtcgccagcaccaccagatccgcctcgagggtcgaaccatccgccaagacaacaccggtggccttaggcttggcaccggtcgtgtcatagagcacacgctcgacatcaccagtgcggaagatcaccttcccctcagcgtcgaggacgcccttggcatagcgcacgctggccgcggcgtcagaccacccagacccccagttcacgtagccgccggcgacatcgagcgtcgagccgtaggccgggacgacgctgagcacgtccgcttgcgtcggcaggaaggtgacgttgtcgccgagctggcgcacgttggcgtagctcttgcgggcgtactccttcgcgctggcgctgttctctgggtacacgaggagcaggccgttctgcgtgtagcggccgtcgcggccccagtctgtgctacgccagcgctcgatggcggctgcggcgagcttggagtaggccgtgttggcgtagtccgcccgcacgatccgtgatgtgtccacagaggatccgtgcgggtttgggattgtcggtgaggactctacgactgttacttgggattctgggtgtcgctttgacagggagagggcggtggatactgggaaatgttagctgtgtgggaattgatatcaaatgcgtagtgtagtgtgatagtgtagagtgctataggttctattattgttcacacttacatccaaacacgccccctccgacaatcagaatcttcgacggcaatgccatttgcaaaaatatgtgtgtttgtgggttaaacaccagaattggagatcaggagatggatttctccaattgatagataacacgccgataacggcattgctcgtcggctcagctcccgacttttctttcctggtcgatatcgtttctccgatctatacggaatgagatgtgcgactgagctcgggatttgattttgatccgttcggttttcatttcttctgcctctaactttcctttggtctcgcgggctgacaaccctgtcgcgtaagcactcaatcttcgcgtcaaaccatatatgcacaacaggctacacaaccctcggcagtccattctgctagttcaaaacatcgtaatgaacgtaaatcaattgcgccgagtgccattaattgcaaagtggcccgtcacaccccgccgcagcgcatcaagcaaagcacctcgacccaagccgaggcatgtaaccagaaccattcaatctcaaccccaaactgacaccctgcagtccccaaaaatccaaaccagtggcgataaaacggcgtcaaccaaccccgcctcgccaacatcaccccgagcgcccatcctcacagcccgaaacccccgatgccgcaacagcaaaaccaagccatggcatcccacccagagccctaaccttcctgggcatctccgcactcaccatcagcacatactgcggctacctgtacgcgtcgtacacgcgtgaagtaagcaaagcgcaaactctcgacgtaccgcgcgatgtctcagaccgctacaacacaacagcggcgaccttcgacgcagacgtcgagctctccgaaaaggcaatgggactcggcaagaagcggcgagatctagtgcgccaggcgcgcgggaacgtgctcgaggtcagctgcggcacggggcgcaatctgccgtattatgagctcggcgagcggcgcgggttggatgccgatgggcacgcggccgtgctgggttgtcgctcggttacgtttgttgatcttagtccgcagatggtggctattacgaaggagaagtttgagaaattgcatcctgcgttcccggcggtgtttcgcgcttgtgatgcggggaaggttgagccggctgatatcgggcgtgctgggaagatgcaagcgccggtttactttgataccgttgtgcagactatggggctttgctcgatgccggatcccgttgctacgctgcggcatctcggcacggttaccgagcctgtgagggggcggatcttgttgctggagcatgggcgttcgtattatgattgggttaatcggattttggataatcttgcgccgtctcatgcggatcgtcatggctgttggtggaaccgggatattggggagattgttcgtgagagtgggttggagattgtggaggagaagcgttggcatctggggactacgtggcgttatgtgttgagaccgaagcagagtgagaagcctcagtcttgatatggtgtggcttggctggagctatgtaacataatttggaaatgtgtatgaatatttggcgtgataggaatggattcagaatagactatagaattcaagtgatgagcaagaacttatctcggaaattggcctcatccatattcatccctctgtccttaataacgatatctgaagccgggcgtcttccaatccgtgacatcctcatagtcattcgataccaattgcacccggttcaccatatccgccacattattcgaatcgtcagcgtccaaccccttcccaccaacagcacccgagtttccagcactaccctcaaagccctccagacgcacacggcgagcattagaccactgcaagtagaagcgcagcaccaacgccaatacgaccgccagggcatagcaaatcatgatcgtgcggaaggccgtgttataagtcggggcctcctcactaaggaagaactgaggtccagagatatttccagcgcagtaagccaggaagagcattgcagtgactgtcattttcttagtgacaccacgataattagcctggaccagcgacatggcaagcggcattgcggccggaccagtcgacaagaggaaatatccaaagaattgcacgcccaggacgatatgcgcgcgggagtagataatggcactgccgacgacgcaagggatcacaacggccacgataagcaggcagttcagttggcggaaacgaccggccagccagcccgttccggtgattgtggccacggtgatgagcgagtaagggatggtgagcagcgtggattgcaagtttgtgaagccgaacgagacaatcactagattggcaaagttctgcgttcctccgttggggatctgggtgcaaagctccagtccgaatataagccacgtctttggatccatcaggcattcgacgacttggtcccatctccatgcggtcttctctgttgcacctgtgcctgcaatgacgactcggttgtttgcaaactggcgttcctcttccgagaggaatttagccttggagattgagtctggtagtagagcccagacagcgaatccccagaggaatgtcgcgcagccgaggacgatgaacatccacctccatggcccgacgttatccttgacgtgacctagtccgtaggcgaggagactggaaataataccaccgacactctgtaaagatgagcttttattcaatatattgacaggaacaacatacgtttccggcgaaccataggcctgtcctagtagggatctcgtcacgcgtgtaccacgtcgacgtgataaacataaacgccggcgtgatggttgcttcagcgactccaagcaagaagcgaactgtaatgagaccgccaaagttggtgcaggctgcagtgagggccaccacagcaccccagaatagcgtgttggccgtcaagtatttggcagcgggcagacgggtaatcagcaaggttgttggatatacccagcccaggtagccaaagtagaagattgatgatacccagctgtactgttggccaaccaagccctaaaaatgatattagttgtggttcttgtttgttctggacatgttcttacagtatcgtccctcatcccgaagacagatgcgctggacaagatggttttatccatgaaattaaacatataagtcgtgaaaagcagtggtaccagtcgtctgtcaatcttcctcaggactcttttcgccatagcgtggtcgggggtaattgtttccatggccatttttagtgaaaagaaagggaatactggatctcaagacatttgaacacttgaactcttcttattgaaaagttcatattcccctgttatctttccccgcaccggtaatttgtccaacctatacttgttatcgccgtgatcgggcgccaattggacgaggatgaagccaagtcctttagggctagagctagtagctagtatggacgatcttttcggagctcttcttctactccgaacccaactctgaatttgacatcttgccaactacttactccgaacttgtattgatttcgccgatagtgagaaccacttcagcagtaatcatgaacggcctcacaatcaccccgttcatagccaatcttcccaaggtcgaactccatgttcacattgaaggcactttaacaccctcactccggtgggagctatcccaccgcaacaatattcccctcccgtacgccaccttctcagacctgcaagcctcctacgcagtaaccctcaaccaccgacctgagctcaatggccgccaacctggtatcccaacctttctggaagcctatttcgccgggtgcgaagttttgcgcgcagaaaccgacttctatgatttagccatggcctacctgcgccgatgcgcagccatgaatgtgcgctacaccgagccctttttcgacatccaggcgcacacacgtcgcggcatccccgcagaagctgtcctggacggatatctgcgcgcgcaacacgacggtgccgctcagctgggcgtgcattcgcgctggatcatgtgtttcttacgcgacgagcctgtgcagcagggtctagatgcataccgcgaggcgcggccgtgggctgctggaactgttgagggcggaaagggcctgtttcatgctgttgggttagcgagtaatgcgtacgagaggccgccgatgcttttcgaggaggggtttgcgttggcgcgcgcggatggcttgcatgttactatgcattgtgattttgggcagaaggatacgcgggagcatgtagcgcaggctatttttgaggtctgtgggggaaaaggggcggagaggattgatcatgggttggatgcggaggattgtgaggtgttgtggcaggggttggtggataggcggattgggctgactttgtgtccgcatgcttatcatcgaaggacggcgacggaggttttgtttccgaagattcggaggttggtggagaggggggtgaagatttgtattaatagtgatgatccgactttgatgcatgatgtctggattgatgggaatctgcagaaggtctatacttattgtgggtttagtcggggagagatggtgcagctggcgaggaatgcggtggatatgtgttgggctgaggaggacatcaaaagggctatctatcaggaattagttggtgttgatatttgtgaataactttcctaggagggttgacttccccccaaacgagatcctgacacggaatgttccagatgactttttcgaaggcaaactgagtaccttgtttgtttgataattgtgagaacagcaggtcatgtggcagtcttacccctcttctattcaacttagtccttcatcctcttcgactttcatccttcttgatacctgatagttacatcccatcaacactcatggctcggcctctgaggatgatttcaccggccatccactgatgatatattctgtcatctctatacaatcatgatgtgaactcgctcagctactgctgatttccacgggagactctgaggtccgggttttccacactcaccttcaactcgggctctctctctctctctatatatacggtgggtcttatcatcaccctaacctcttcccttgataactgctaatctacgaaggcaaggatatggaactatctttcaacctacacaataccaaaacaggggtcgtcaaatgagagccagccggactccaacaacaagcagaaaacgaacagaaggccagctatatcaatagctatatagaggttcgcagaccaggccccaagcaccaagacctgtctcaacagagaaccttgagcatatactatggcttggaaggaatcgtatccagcgccttgtctcaatatacaggtgcgaagacttgggaaatgctccctatctctttcctcgaatcggatcgtggacattcggtatcccgcagggcagtggctagcctagccgctttttttacaccctcatctcttctttgaccacgagtttggacctggtttctatactaccccctcactcaaatatatcttggaatacgatggcctagatggtgtgattttgattttcaatatctttcgctcgcaaaacatgatgcgggggttcgaaccgaatcttcgactatacattcaagctggaaacaacccaaagacatcttgtacatgctttcaaagagagcatgagaaagacatcaaagtcgcgtggctacttccagagttgcctgattctacaatatagtaacggcagcggcccaagagaagctggtgcagaactacgaatcttccatggcaaccccttccgaggagcgcagaatctgttaataatgctggaccggaattgaccggtcttgtggttcgatcaagtgatatatgatcgagcgattccttgaagcgaacatcggagttgactaaaagaaccgaagagcactcttcctgaccttctgccacggactctcaaaccaccaccttctcctagataatggtaatgattgaagggtctgggtatccttactttgaaaggcatccttgagtgcttgtcgacattacgctcgcgtcaactgtgtttatttcggccgagttatgggtgagcctgctcctagtgagccaacgtgaacgaagtatgcaagactgagctgagccatcgtcaaccgaggaaatatgagtgtgcctgctgttactgagccggctctgaatgaatcggacctgacttggcagaccaagaccatgctgttcagagcctgcggaccggtattcgttcactcgatatgtttcttgcgacgcgggcggcagggagtcaggctcatcctagcatcatggcttttccttggaaccacacacatgttagtatcaagactgacttacatcactccaccctcagaatttgtctgggaaatgctatgtacgttctatgtgttatcctatccttctagaaagtggcgctaactctttcacttcaaaatagttacccgaaatcatcagggtatcgccgaaaatccgtcatctcacctccgagaacagcttattctatcttctttcgaccgtaagacacattggttttcgcgacgaatcaagtgtcagctctgtgttgacacctggaaacacaatggtttctaacaaagatggggaaccgtatcatacagagcagccatgagatgtgtggttcagggtcctgcttgactttccaactctccaagtaggacccaatcacactattggtagtgaaatacggagtactccgtataccaggtggattttataggaaggctagagccatgggccaacttcaagccgatgtgctgtcgtcttgtactcgccaaacccatattggagccacacaaccattgattatgaccatgagtggccagggtgcagacaattcggtcttgcggtcttggaagtggctatgcagaaaatagaggaattggggtggttggtgttgaagattgcttttgaggcgattctaaatagacatatcctaccttataagttatccatgattacaagctcaataacaacacagcatatctccaacacaagacccggtatggaacctggtatgtgctcataatcataaagcggcacccgatcgggagatccccgacggcctagaatcgaatagagcgacagacaacatatgttgcgtggactagtacggagtagccacccggcagtttgtcggcgtggattggctgatgcggcatatcgaacctgtcccgcattcaaaacgggttttcgccaccaatccccatcattgattctcatgcaaggcgcagatcttttgcaggggctgttggatgcattctttgtttgcagttcggtcgtggtgtggcgggaaagttggaaccgaggatagtgagtttaggtaaggtttggatagatgcatcgattctcgaggggtggtttcattggttgtttagattgagatagcatatctgatacacgcaagctatctacaataatatgatatacttttgaatgcatagctggtagataatgtaaacataaggagtacgctagttaaaggggaagtggacattgtaggtacctgcggttgtggaggtgcggagaattcccgtgcgtctgcatggacattgtaggtaatatgtcctgcctgtaaagaacattggcagaattcgacatttaatgcgatcagataaactagttcactaaggcaattgttccctttcggggtgacaatggccagttcccatggttgacgatcccgatcccctaggcccaagtggtcgatgtcatgaaaacggagatcagagcaatgccccactatgtatgtgctttctacaatatatgtacggagtacatgcacagatcgcaggggtaccttcaagaatgatatcttgatacgcagtacgtattaccgagacctacagcacctgggcagcaatgcttgtcagtaatatatacatcccttgctggataagagattgggcgatgatgtacaatatacgacgtactttttgggtacttttaggtacttttgcaataatatcccaactgatcatcatcatagagatgtggatgagggctccgaaggatgtcatatgcacgtaggagtatacaagtgttatattctttccccgatggcaccacttttcagaggcaactgcggcaagattggctttggatatttataatttcccccaaacgatagatctcaatatatggtagctgacagtgagatatacaaaaacaaggtctcggattttacatcatcggtggcaaacgttccttttctccccgagacgctaatgtgagcatcccttactagcgtcatgtacaatacgatacaccgactctgattgatcgttgtcccgtcgattgggtccctggggtccaccgagaagtggagcccggtggactttaagtggccactccatatcttttttttttcttttccgtttcttttccttttctatttgtaacggccgcgctagagagcgcttttgggtctcggtgtttccgaccggagggttcggcttaaagccttgtctttttttcctggtcaaaaccgacggactggacgtgttgatggtggttttggaatttgatgtcgtgtgtgtccatgctcaattggtatacttgcataattagtttgttgtacaactccataagttaataataactatattttgatctatcaacagcggtgtgtttctggctcccccagcaaccaacaggtgacagatcaaataatctcccttaccagtctcctccgtacatatcccatgcagtaggaaggctccgagttcaacaagaccattatccaccgtgcaactaccaatcactggatcggtaggtcttattattcctcaaagcatcggcttgtgattagcgggctccgatgtaatgcgggatgggctaaccactagagttgttgggtgaacggagacgccaagggccatggagcaccaaaattggacttagtcgggtcgtagaacacatggatgccccacccagctgtttcggtatgcactaagaccgaagatagaagggaaagaactatggattcgcatactaaggcccgaagaggaatggggtgatccgcactgcctggggattgttccctttttgcctgtgcgtgtcgcatgtcgtatgttgcattattctggcgtggatatagcggtgaggcgtgtagagtggtgttgaagctaggtgggatatatagtgctaagtacaatatactcccgagtctacgctgtagataggcatatgcgcatgtacaagtacagacattcttaaagaatcgaaaaggaaaaagaaaaacaagccccagaccagccaatcatcgctagactatttcgggaggctataataccgtacggtaatttacgccgccaatttttctcaattttcgccaatttccacttttcccaattcctcaggcccccggtaatttgccatacaaacacgctctgcctgtcgcatcttgatgatcccccccatttatccttctcatccccctttctactaacatcccccatatcttagaatcgtttttattattatccttcttattactctgtttattattatattctcttcgattatatcctgtgttttatcgtgattcttgattcttctgctctactccctcacaatgccgtacaacactcgtcgcaagtcactatccctcccgtccttgggaattcacctcccaaattccactcgtcgttctccctctatctcaaaagtccacagcgatgagcaacccacaaaaaaagtcaagagatcgcacggtgcttcattatcacctgaaccctccgacaagatgatgcgcgctggccgacgtggactctttgagtttacaccgcccccttcgccgatggatggagtgcttgcgcccaagatcgatacagaaggaattaacgacgacatcgttatcgctgtaatcaaccaattagagaagactggcaatcgccctcatctggtgaaagaattggccgcagtcctggtcacactaaatgtcaatgtcgcgaagtatgtatccactctaggcttcctcaaaacacgatcgctaacatctcctctcctagttccgccaatcccgctgcgctgctctcgtcgcgcttagctgcctatatgaagcgtccttggaccgccctctcgccatgtccgatggccaaggagcttattttaattcatccgcgcaaagtgtactactatcttactacgtttccccaccaacccattccggagaccgacgatctggtatctgccgtgggtagtaagcacctcacacccagtgtgtccagtctcgaggatgaggaagacgcgatggtgcgggaacgtagccccagtcccgaagtggacttgtcgtcccccgacttcgaggagcatggtgatttgaacccctcggctagccatggcggttcttctaatcacttctccaccgctagtaatttgacgcgtcttatgaactcgcaccgtgccgcttctccgcccctggagggtgacgagaaggaattcacacaaactgccagcgccgtgcgtgagcgtgcatccgaggaaaaagccgagtcgagccgtagccagtccatcctgtccgagagcctgagcgccttggaggaccgcgatacgcgcatgtctgaatcgcctatgaatggtggttccatgtctccgtctctgcctggcgacggtatgtccgaagaagagtatagtgactacttctcgcacatgcccatcgaccaaatggcccaggatctggacgaggctgccgcgactgccctgtttggcacctccccctctccttccctcacctctatcgcatcgtctgtctcgtctggcacgagcgcattgacagatatgggtgtggatggcgaggagcttgccggcgctctggttgccccccagatcagcctccccgaagatcccgatgcggcccctgtttcgtccctcaagcgctcgcttgatatgttgaacagcggcctcccagatgtcgacctgaagatgtcggatctaacggaatcgcacgagaggctcacccttacccctcgcgctatctctatgaactcggagcctgtcttcgagtcctggagagaattgcagaacccggagatggtggaagtcgacgagctcgacgagatgtttggcgaattctaaactatcctcgacctgagtccatttatcccgtttatggttccgctcttctcctccttctctccactcctagccgggctgtgtcccgtcatgttctctttacctcttttacgtcgcttgtacatgctcattgttttctcggcgcaactttcggcgcacccttttacttttcttatcgctaatgcctattttccttgtatatatacatttgttttggactatctaccctggaagggtagattgggaggatattcacgactggagaaatggctttacccaaaagtgtcaaaaatactagcgtttcttctcataaattcatcttttctcatcttcatccatggttgtagttgcaaaagagacaacggttcctgactaagcagtgcccaatcaggaaggcgggcagcctatcatccatgggcagcagcctagagcccacccgtgggccgctttaacagaatccgccactcgactcggctttgtactgtattttctttcttccgcgggacattcgtacctcgaaagacgggtctcaaatttcccttatacatacatctcctttcccgacctcccatatgcaaattcagccctatcatctgtcacaactttatatacatagcgccgcaggaacccaatatcgccaaccatactctcgccaacgtaaggacttctgcgacaatgacggccggagaaccttcgcatacggacaaagacggcgccgttcctccacgcgagacgtccaccaagcaaccaacagcggacatcgcgcctgccggactacgccctctctccatcgcaaatactatgtcaacaataggcgccaagagaaccaatccgggccaggcttccttgagcaagacaattgccgcatcacaaactaaagttgccattccgcgtcaacgggtcgccgctgccccgcgctataatcggcgtgtgccgcgtgcttgttcgtcttgcaggcagcgcaagacgaaatgcagtggtgatacgccgatttgtcgtcagtgtcgtgaattgagggctacgtgtagctacccggacggttggagggagaagacgaaaaagtatgtataagtgtatctgtggctacgcgagccagtatgctgactagctggttacagacaagttgaagccctgtcggaaaaagcgcaagaatatgaaaatttgctgaaggaattgaggggtatggttgagtttagtgccgcagagcggatcagaagcttgctggacaaggtttgttcttcttttgggttatcggagtgttgctaacactcgtaactatagtatggtccggaggtggatggttcttcgcaatcccaatcccgatctcaatcagcaaccccgcaagatgacattccagaaaacgatgaaccatcctcgccttcgtctattgggtctcttgaggcgattgatcgagtggaagaggatatcaatcgatcaccacatgcaagagcaactggttatatggggaaaaactcggaaatcacctggatgcaacggctacagagagaggcagaccaacgtgctcaaggtcttccggggagtttggagtttggccaggaccccaagattgataatgcagtggctttgcatgcggtcaattatcatcttgacgacttggatatttccgtgcctgaaccggtacagctgtatgccatgcctcctcgagaggtcgcggatcatatgttcgaggcttatttaaccactgtgcatccgttctttcccatcatcaacaaacctcttttctcagcacagtaccggacgttctttgacagcgctgctcgacccggtgacaagtggcttgctatattgaacatgatattcgcaattggagctaaacatggccacctcatcgccgcaccatggcgtgggaccgagaaggaccatttaatatacctaactagagccaggatacttagtatgaacggtgatgtcctgttcagccatcccgatctccaacaagtccaagtggagggcttgattgcattctaccttctcgcttctgatcaaatcaaccggtgggttaagaacttcctctcattaactaaattgagtccaccataacacttaatagggcgtggagaatctcggccttggcagtgcggtctgcaatcacacttggaatcaacatgaaaagcagcagtccagccacacctgatctttcgaaagaagcccgttaccgagtctggtggtgtctgtacacatttgagcacctactcgggataatgaccggtcgctcaacttgtatccgggacggagtgtgcacctcgccattcccgattccatttgaagaagaacagctgcaaatgcccgaagccgtcgaagtactcacagatgcggcactacgagacgaacggatcaacaacgtcatggcaagttcgcgtatcagacaaatgccgctccacccggtaaatggtaaagatgctagtcaccacactcgagcaaaaaacactgaatgggtcaaaaacctacctatcaactacgggctctgtcatctctactattgcgacttgacagtcgtcgtgcaagaaatcgtcaataaagtctattcagtagactgcgtcatggtgccatgggcccagatcgagcaacggattagtgaactcaagtcccgaaccgacatctggaaatccagccttccaaccgggcttgactttacacgcaaggatgataacgggccagatatccttcgctgcaaaatcagcttagcgttgcattactacagtgcgcgaatcacactaggtcgtccctgtctttgccggcgcgacgcgcgccgaaggggcgcgcacccctccttcagtcacgaaatggcagtgataaccctacactctgcacggcacatgctggatctagttccagatgagccagatgccatccagctataccgcatcgctccctggtggtgcatcctccactacctcatgcaagcaacgaccgtcctcctcctcgagctctccttcggcactgtccacatgcccgaagaagaaaacaacttcgtcgccctgtccaagaaggcgatccgttggctcttcgccatgtccgagcagagcattgcctcccgccgcgcctggcaactctgcgacctcagcctccgcaaactagcccagggcatgaagtacgacgtcagtgacatgccttcctacccatacaccccagagcctaaaagcactatcagcccggagccgctagctggccagtctgtatctcaagctgatggcgactactggggcccacaactagaacatctccccgtgtctgttccggagggaccgcctcgcgaagaccacgacacctcgaccgcagagctgatgacttcgttgacggccgatgcccaggactcgtacttcccctatgatcctatctccggggagtttatgcgctctttctttcctaattctaattctaatgagaatgagaatgataattgggaactttgaatattgcatattgcatacaattgtcgcccatactcacttcacgattgttttgtgtatgaaaaagaaaaaaagctacagaataacatgtaagaacatgagaagagtatgcgagctcgcatctctctcttttttccactgacttgcccacttattatataccccaatccatcgccctatatccaacacgtccctatcctcagcagtatacttaggaactatttttaacatattaacatccctatccctatacctatcctacttatttcttgtttcttccttaccgatattcatcacttcttgcataaggaactgcttgctctctattaggaattagtgcagtgaagcacagaagagagcggcagttcttcacgattgaaacatttccgtatgtgatacccatctctttttttctccatttcataagcctttctccctttatctaccgcgaatatctttctgcattacagatattttcacaatgggttggcaaaagtgatatctcatgattgatattgattggggctgtgcccactctagagctggacttagaacgggggcttgaaagggttgagattgccatcagactagaacttttgatactaaattcattcacattcatttgtcagcttattcattaatgcaatcagcacatcgtagagtaaatatccaatccgaagaaccgtcctggctcaatgacacagccttctcaagaagtccaagtgagaaaaaaaaaatagtatatacattcgagaatagtttttactttgaagataaaaatacatatagctaggacccataagcaaagaatcagcctagatattggggttatcataaggccacttcggctccggctcctccgccggcggcaaagactccgccaattccttcggccagtgagatctcatgaacggatcggatcggttgtacttgatccgcatcctgacgggcctgcgcgtgggggaagaaaagacctttcggagctgcatgcggcgcatgtggccggggatctcgatgtcgacttggtcttctgggagaccgaatttcaggaaggtctcgagacagaagtctaggatggactcgagctcggtttggggcatcttgccggactttaattgataggggtattccttgcgggagatggagggtgtatatgaagcggcgcggtcgtagatgaaggaggaggaagtggtgttattcgggtcggtcttggtcttggatttactgggacggccgtggggttgttcgtcagtggcttgtttcacgcactctgcatattctcggacggcacttcgtgcgagaatgcggacagtgttgaggtctgctatcgtggctttgcttcggacatggttgacgtaatctgcgtcccagcctggggaaccgtgtgcattggcccgttcatcactgaacagcagccgggcaacaccacctggagattggagctggcgcttgggagatacccagtcgacacagactttatcccagagctgcttgccgacgatagcgccctgcgtttcgacgacggcagcgaagatctcgtggaaggtggctgggggaatcaaagtggccttgtggtgtccggtgatttccttgggtggctccacttgtttgaggatgtccgggagaggacctgggatgagggagagcacgcggtgcatacgagagagtgttcgaagctggaagttcctgactttctcacgagtagtattagcatgccactcgccgcggaaaatgcggagcaaaatgtccgtggcctgattcaggtcttctgtgtctgccggagtcaaggtgccggcggatgtcctatgtttaacggtggcatcgagccgaattattgcacttgccagtacgccaatattgacgtaaccccaagatttagctcggtgctcggtcaagaagttgagcatcagcaccacgcgcttccaatcttttcgtgtgatactgaaattgatcaacgatttgatggtgttcacagaaagagggatcgcgagtgacgcgatgacgcgctcgccaagctcgacgttagcagtggcagctgcaaatcgaagaatagatggcgccagggcctggttcccatatgcgcgttgagggatagcagggccatcgatgtcattttccaggagtagttgctggccaaaatcaaacgcgtgggttgtagtcgccacgtcaaggagattggcaaaagtggggcatgacaactgcggaatagacgattgagagatatcatgaggttcaaaagacttgaaatcaaacaacagagaggcttcttcgtcgctggcttggctcacccgttcaaaaaacctttggatgtgctgtgccttgcttgcatcggaaatattttgaagccaagcatactcgtggaaaaggcgtccgctttgcttgtcccgagcgtaataattgagattgaactcgattaggccagtcatagcggccgattcatcataaaactgcgcccgcgttttcccatccaacacttgtgccaagctcaactcgttcccttcccacggaggaacaacattgttctgggaccttaggagatcctcgaaggcaacaggatcagaggacggttttaaacagcccgaggccaatatccgtacaatgtgccaattggtgaacctgttcgttggccgaagctcctcacgggtggacaaggcaggatcaataagtttagtcagaggggctgataaatttgtgagatcctcaggaagatatccacgatctcccattccgacataggccttgttcgccaagccgctccgcagtgatgcaaccacctcagagctgatagttcggaatccaagtccattgaatggttctttgtcctggcccttgagtattgggggtttctcattttggcctggccgacgccatgattgctcgatactgacattggttttttgtactgtagcaaggtcatttataagaggcgcccaactctcagccttccattcgataagccgggtcatttgatgtacgagtagtgtgcccgttctgcaaaaaccatgctccacacaacaccatagaatgagctcaagccaaatctcaggacctagctctcgaattcccggtgtgtaaggaacgaaaggtgacagcttccctgcatcagcggctgcagcagccactgcgacttcatgttcatgccacgccgcgtcagacaaaacgctcattatgggaccggacaaaaaatggagccctggtgggcggaacacaatctggctggcatctggcttcggatattgataaactctatcggagatcatgcctgcatggtgtaaacgggcaagagttcggtatacgcaggacattgcatgctttgaatcatctgaccgactgcgtgtagcatacaaaaccaaagagccgaggtttgcgagtacttcagccagaattctctccccaaagaatctcggtgcaggttccaccgttagcgtatcaagagaaatgttgtctgacggaaggggttcgagacgagaccatttccaaggggatgatgattttgtgcctcccgtgagcttgctgagagagaccttcgaggtaatgggagacaccaagtcggatgttgactcatctctgcggcgcacacgatatggtctattccaatcaagcccagccgaagggtgcttaggaggcatatgagcagctaacaactcataggtgtctatcaggctatttaaaagagcctgcacattagaccactcatggtgtgcaaatcccagatgcgcgatgagttgaaattcaaaatgaatccttccatcccatagacaccccagtagagcatgggtccgatcaagctcatgttcggattcgcggagtggtcgaagccgcctaggctggccagcaggttgggcgacgtctggtggtttggtagtttttggtggaatacaatccctcagcactggcatccattcctcgatgtgtctcttctggtcatgccggaggtgagggtgtttgattaaattgtatcgacgtagaaaaagaacttcatctgggaaattaatctccctttggtcattgcgagttttgcgggtgtattgtgtccaagtcggtcgggagaaaggagacacggatcgatatgggataaacggtaggcgtgaagcagttggcctgcgaccgaatggcaggatgcggccggggcgcaagcacctgctcatggtaccgcaacgaggcttaaaggcgggtgtataggtttcgcgatctcgatgggtacgggattggcgtgatacatgtcgatttcacaggtacatagcggtatattcacgagattcaattgaaccccataccaacaggggcaaatgacgaccagagatgggaggtgaggtaaatgttgtttcgagaattttggagatcaggaactgctgagtcatcaccgagctatgaaccaatcggaggccacagaatgcggagtttttgacaatataagaccctacattggaactataagggaattctctcctagaatattcagatctggattagatgatatgtagaatcagtatattttctgctaagtgagctctgattcacgcgatatccgatgcctgagcaccgagggcgcgactgctacgaatacggctatctaaagaacgccattactatcaacatctacccacattgttactggtcgagagcctttatccactccaaagttcttcccgaagcttagaatttaggatttccacggcatattggcatgaaaaatatctctcaaattcgatattgtttgtgctgtttgtgcatgccctaaagtacaatgaaatgttgccatggagcttcgatctaggtttccgggcccgttccaatcacatgcatacaagaccatccgctaaggctagcttctacttttctacttttgtgatggttatgttatttgctcacaactttaccgttttactacttactctacatagcactcgggaaaagactccaagatagcaacaatatcttctctatgctgatccagcagcgacgagaaacacggtaatgatctatctcacatgccatgcgagcgaaactgcaaagcacgaaatctagtacaacatctgacgggcatgatgacgagcaaagtctccctgctcaccagcaggaagggcagtcacggtcgcgataggcagagtggtgaaggaaccgctagaggactggctgcctgagaagccacccgggaatccaaggggggcaccggtagactcggggaatccagaaggctcgagcgcaggggtactggaaggagcgccggtgggcttggatccatgaccgtgtccttcgtggccaggtccgtgaccagctgctcggcgatcaaaggaaaatccagtaggccatccagtgggccatccagtcgggatgtcacttggagtgccagttggggttccggatggagttccgggtgggaaaccgccagggaagccaccaggaggagaaccggtaggagtagcagcggaggtcttgtcggcgtgctggcgagaatatgtcaataaagcacgagatctatgaggatctatagtgtagatactcacaggcaacttccaggctacgacagacggggccaagaatagggcggcaatgccaaaggtagcagtgaatttcatgataaagtgttgagttattggacaattcaaagtgaaagtggaaaatgaatggatgctaccggtagcaatgtaaagaaagacctgaattgagaagaatgaaggtgcacagcactgtagttgaaaagaaatcaccgagaacaggaaggtctagctggttatataccccttgcgtttcactgttgagagtcaaaatgatagattgagccgttaaaaggtcatcaaaagaccgccaaaagagtatgtgttccgcgagaggagtgggatctgcaggggaccaggtctcatcccgtggcgaaataattcaagcaggagtgatcttcatagatacaaaaataacgctatcacccggagtgtagcatattgtagtggaaccaggaactacggcacaaatagtggatggaacgcatattgtgcggagcaggttgtttcagacaaaaagaccccgataaaacgggcgaatgatagttctccaccttgttctgcacatcagctcctgtcgatcacttatgtgtctgatgaaggaggtgtgtcctgtttagatggagattggtggagccctaaaggcggcaagcccgcgaaggtctagaaacatacactacgcaacattaccagaaagaatctaacttgtgggatttcttttttcctgagcgtatattgtatgatcgctcatttacggagaattagtgctgtaataagtctgatgtgagcatgcccataaatcctcatgttatgctttattccttgtgtctagaacaagttatatagtttaggtcgtttttataggacactttatagagttaacagactagattgtggaggtacttagttatatacttatagtgccatgcactggtcaaagcttacatactacgcgaataatacctaactccatgtggtctagggcctacgcttcaagcttttgttgtaacttattcaatccgttgtggcagatgctctcaattctatgtaaaatttccgaaaagctgccctcgatttccaaatctggatgtctttacctttgaatgatcgactaaggcgttaaaccaaggcaaaaccaactcgaaaaagcactcacaggtccgccatttacaactagaatatgaggacatgtaaaaaagagaaatgtccaattctggcactagagacagccgtctttccaactcgtagttatctattctgccccgactagcactgttagtcatcctcctgtggccattaattatggaacctgaccgaccaaagccaaccatatcggtccaaaatccggtttcctctgtttcacctcgaaaatgctaccgtcaaggctaggtggatcaagcccttgacccctataagggaaatagcacagtccaacagtgtacatccgccacgagtcccaaatgacaagccccaggcggcgccagggcctgaagtgccttaagcccaatgaacctgtttgagagaccatcgcgtttatcatttggaagtactggacatgaatttgtctttgtgaacgccattcgggtgtaagctaccaccgtgttgatgttgttgcttcattatcggggggtataggcggcggagaccagatagacatggacttactagagggcagattgaaagagtcgaagaaaggaattggtgttttctcggggaattcccaggcagcgtgggaggactcgggtccctacgtgtccattatgaaccactgagatctcactcctcggcgtagtgccatagaagggagtaaggcctaggtctgaaagaaggacggcaatcgtccagatcagctcgttgtttcctctatgtatctcattccagacattgtatgcgtctaggtcctgtattgattgtgtatgccaattccagcttcccgttgcagatttgcgaagggccgaatagtgttggagatgaaagagagactagtacgtgcggtattcttcaatccatgagaagggattccgccctttttctgcgcgctcagctccgctcagagagccgactggtatttcactgagggtagaagcaaagttctgctgcataagcggtagacaagcacaggcaaggcgctgtattccggcagctaggtggatgatgccgattgatgccctgtaatccagatttagtgtgtactcggccatgtgtgagaataggtttccgaggacgggcttcaccgctggcaccgagagcgcgactagagttccagcgatctcggcgctctcgacgcacagcatcggactgtaggcccagctgccgtcggagtcccattgacctgcggctacgagccaaacgcggattgcggagatcacgataacgccgtgacctcatatgcttgttggctgtgggcaaaatctgtgtaatgcgagatatgaacaaggctgatgttgtagcatattctctgtatctccggaaaaccggtaatagggtttgccagtaagagggaatgtataatggagggttgagtccggaagagagcgtggacttgagaggatacggatgtgaggttttctatagcggcaaaatcggcgatatgaatgaggatttgttggttcagttctgcgggtagttaagcgaatgggtccatggtggatgaaatattagcagtgaagtgtgtgaaaatgagaaagacaaaattgggaggtagttccttaagtactactcacctaccctgtgttgtctccgccaagcccaggctaattctcaaccacgcactataaggcactgtagaacacttgatatcgtacttcattgtttgaagacattaaattaccagcgtaaaaggaccagcgatcatggacagaccagtcaacgcttgtttgtaactatacatctgttcacaccttcattcccgtcatgcgcccttataattgccaatataaaatagaagatgcttttcggcgaagccactcttgtttgtggtcttaaacacacgcacctaggttggaaccttcactcccagctcgggtttgtgctggataagcatatatgcgaccccaaccccgttggcagtccgcagaagtgccttgccttcatcactttccatgctgaaggtcgtgcctggccattctttagcgacactccccgcggcctcatcaatgatcctcaaggtatccggattctggacatttttccgaataaagtacttaagattcttgattttgttactccccgcggccaacttctgccattgaagaaaatagacgttcgatagcttgtatggcgagagcaaggggccggtgtcgacctcatgcatgacaacaagtagcatgctacacgtcagctgtgacgtgtcagccagcacaaccaccaccggggctaacgtctgccacctgatagactgggatgaggaccagggagacagcagcaagaacagacctagcgacaatcccgatccaaagccaacttccaccacttccaaaaccacctcaacatccccagccactacaatagccacaggcaaacccgtcccatcgggcctgtcttcatcccgcgacgacatccaacttgtcatcttcgattccaacaagataacaagcgacggctcaacatggcattgggccggatacctcctccccagccttggctacgacgacgaggacgtctgcaacgagaaatacgaagtcatctcagacccccacgtcgaagacaaccaagcttggcctttctccatgggcccctttaatgctccaggtttagattactgcttcttccacaaattcgcggaccccctctcccccaagtaacccgggctttatctcctgtaacaaccatgcctatctgacgtggtgcatagggcttgacgggaaacatgcggtgaggaagccggcgcatacatgtaccgggaatggcggaaagaagaccgagttctggcttcaggcttggtgcagtttgaaggggtagaaatagctagttgccgccattatgcagatggcctagtttcagctagggtaccggactttgcatacaaatacctagtaagtgggagaagtagaagaatggaaaatgagacgaagggaggacgagcggcgaagacggggtcttttatgttgaaagacatattacaaaaaagaaagaaagaaagaaagaaagtaacccataccaaaagaatatatgcaatgcgcgtcctaaactgatcccggggtattgtacatgaaaccaacacaatcaaattgaaagccaaatcgtcaaatcgtcaagtgacttcaaagctcctcctcaagaacttcttcttcgccaagctcttgttccacttcgtcgacgacaaagctctcgtagtcttcaagacctttttgaacatgtactttgaagcgaatcacgtcattaagcatcgtttcgacgttagtatgcaactcctctcggagggaatttgcccgaagcgtcagttgttcgtattcgatattggtgttcatctcgcgctgctccatcaattgaacactgtcgctgagcgtagcgcgcatctttgccaattccttctccattttctcaatttgggcatcggaggccagcttctgagtcgtcgtgatttcttttgttcgttcaaactcttcctctgctgcccggcgtcgatgctccaaagcctcgacctcgctccgtttctcatccattgcctctttaatgttgtcgagtagattgcgacggtcaaggtcatcatcgatcccttgcttccgtcgttcattgatctctttccggagggattgcaggctgtttcggacagagcctcgtagatccaaattgagcaaatgcgccgggtggtagccagtgaaaggctccgccaataagcgatccccctcgggagagattgggttggcagggccaccaatttggctcgcagagaaattgctctcattaatattcagggtaagctcataatcttggcccttggcgttctcagcagctgcgggaatcaagctagtctggtagccaagagtattataagccttcacgatctgttccagatcttccagtttctggctagcttccgcctccttctccatgacacggacatgggcctcttcaaggcgagctacggtatcttcgagattcttctgtagacgttctcgctccgagttcatgcggtcgatatcctgaatagtgatgccttggcgatcaacacttgcctgtagttcggaacgctcagattcagtggcctggagatcggtatcagttttctcgatctccgtgtcgaggaatttgatgcgagtctcgtatttttcgattttgcctttgacgttttgattataatcctcaaatttcctcttgtcatcctccaagatacggaagtgtttatccaacttggcaatgtcgggagcactcttctccacttcttcaatttgatcacgaagagcccggttctccgcctctagtgcctccagttcctgcacgtaccgttcgttgccaagagcaaattctcgcgacatgttttcaacgtgcgggattaaccgcttctcggcggtgtcatcatcctcgtcttcaccaccctgtagccaatcgtgatatgcttgagtgaggaaccggaaaataatgcgatcaccggtgacatcgacacccgcctcggcgcaggcatcatcatactcgcctgactgatagcgatccatcatctgtgccaattgcatcaaccaatgtagcattccgaggaaggtcgaccagttctggccaccaacggctgcgatttgtgacttcgtaatgcctttctcatatgggtatcttagctgttttaggattggcggtacttcggagtccatcgctttctgaaacttgtatcctggatcgatccgatgatatagccactggaagataaggttgaaatccttctgggtcggtgagcgaagagtgttctggcccaaggaatgtttcatttccaactcaaagccatgaatagtcaaatactccaacaattcctggccaatccgtgcctggaaagatcggtctctgagagggcgcgggtctctgggaaccccagccacgttgggaacttgagtgaagaacgattgatgtcccatcggccctcctcccgtggatggtcgcgaaaacacactacttctgcgctgtgggttttgaggcggtgcaggaatggaggaaagagaccctggcgcgtagctctgccgactggcactggctccattgaacatgttactcgacactgatcggcgaacagatgagagaccggcatcagcgccatatggtccaccaattgacatgcgtgtaaaatttggctgctgtgggcgactagtggagcccatcaatgaacttcggtggttctgagagctgaacggggggttttggaatccgatagagcttgcgcgcttcagtgccgattgcggttgagggatggcggagaaattttgaacactcccgagagtcttgatcgcaatataaattagcctcaagtcttgcgctagataggggggatctatacctctcgggggcgcttaatactgaaaagcccagtatcttgcgacatggtgataaacaagccgcgaaggcggcaataaacaaggcgattcttttgacaagtgttttttttttggattttgttgaatattgacaaatatccaacgtccaagtggattcaccacaaaatccaagaggaggggtttaatctgttgtttggcaggcacgaggcgggatttgggccggcgatgtaaacaaatgcatgccgcttctaaatgaagtaggcggtgtgtggacacaggaaaaacagtttagccgatgatcacgagactcccgtctggggaagtcttggcgttggcgcgagttccgaggtccaaatggcgattgccgatgtgagcgtcgcatctctccctaattcatcatttctgcacttgactggcagtctatatcattcataatggctccacgcgaggagctgattgcctcagctgtaagttgtctagtgacacaatgtctattaccatcgttcggggccacagctaactcatgcgtccgctagattacctgtatgggctacgaggcacacaacttgatgtgtaatgatagctgactttatctagtcctccaggatccgtccgttgcatcctcgcccattgaaaaaagagtctcatttctccaatctaagaacttgactcaagaggaagtgaacatcgccttatcgcgagtgggcgaagacccgtctgccgtggctgcagctacagcttcggcatcgtccccggcgcctagctactcttcacagccagttccttaccggcaaccacagcctccccaaggatatggctatcctccatataatcaatggcagccgcctcctgagtacgtttgactatcgattgtcgcatggtgttcgagactaatcacatgaaaaggccacccaagagagattggcgtgactggtttattatggcaacagtggtgggtggggttggttacgggttgtatactgtcacaaaggtatccagtggtcccctctcttaaattaatggcgctgatcaatctatccagcgatatatcgcacccttgatcgccccaccgactcctccgcagttggaacaagataaagaaaacattgacgagcagttctcacgtgcatttactctgatcgaacaattatccaccgacactgctgcattgaagaccgccgaggaagcccgtaccgagcgcttggatagggctctcaaggacgtagagagtctcgttgctgatctgaagaactcatctcgccgaagagatgatgagactcgtcgcattagtgacgaggtgaagtcattgaaggatgccattcccaaggcccttgagggtgcccgggaaggcaatgagaaccgactgaaggagctcggaaccgagctcaaaagcttgaagacccttctgggcaaccgacttggtggtggcggagctactcctgttgctggcaggacccttggatctactccattccctagcactcgcccggcaccggaagagacccccgccacttccactcctgctgccaccaacggtttggctgctactgtgactccagccgaacaggagccaactcaggcagctgccccagcaagcacaatccagagccccaaccccctctcgcagcttggtcggtctgccgcctccatcccggcatggcaaatggctgcggccaaccggtctaaggccacttcgcactcgagtgcacctgccacacctgctgaaaacaccgctagcccgagcctggagcagagcgctcctactagttaaagttgaactgggtttgctaaattattgaatgctgtatacctctcgacctagtgtatttatcacaatgaagggtttcccttgcatgagaaggtcgctccgtagtatagcattttctattccaatatgaatttgtagtcgaaatcaacgagattgggatgaagaaccttggaatgcgctagaatcgaaaacccggggactggccgaaccgataaggcgaccgtcttatcaccccagacgataatctcctccaaactttccagaaactctcaacttcagaagaaacagccaaaatgccttcgccaactcgctcatcgcaccgagctacctctccttctgcaccaagctcaagccgccatcaccgcagccgccacagccattcccaccgccatcggcatcgcgagagctcgcgctcgcgctctccgcaccgatcagacagacaccgatcagaccgtcaccaccgccatagcgaagacaaagaccgcaggcaccatgagcgacgacacagagacgctccagcgaaaccagtcgtgcttccttaccaagcgcgtgcgctatcagggcgcgacctgaaggtttatgaacccatgtttggcatgtacttggatatccaaaaaggaaaatatatcgaagacttgagtgaagatgaagtgaaagggcggtggaagagttttacgcaaaaatggtaggccgaaggtattctttgcttggcgcgatgattactgacatcgcaggaatcgtggagagctcgcagaaggatggtatgatcccgttacactagacaaagcacgtcagcatgcagaggaggaaccgacagctggcccaagaggcggacgcgaatcgcccgattatacgcagggccagcgagcgactggtgaaaccctacaggatccgccaataggcgatgacgatgatgaggaggatggggatgacgagtacgggcctagtctgccaaaagctggctcagggagaggtggcccccgagcgggccctgcaatcccaactatgcaagatctcgagctcaaaagaggtacgcttttctacttcccctaaatatggccagtgtgctgacctccaaccagaatctgctattgagaatgccatcgctgcccgcggagagtcacgcgatcaataccgtgctgaaatccgtacacataaatctacgatgcgccagatcgaagatgaaattgcaccgcgggctgagccaggcacacgggagagacagctcgagaagcgacgagaacttgcttcgagtaatcgtgcattcgcggacgcgcgtggtggttcgcccgaaggagctcctgatgaagacttaatgggcgcaggcaatgatttctctgccttgaaaaaggagaaggagaaagaccaacgtaaaaagaacgatcgtgagatccggagagaggagatccttcgtgcgcgtacagcggagcgagaagagcgtgcccaggcgtatcgacaaaaggagcaagagacgatgggcttcttgcaagctctggcaaagcagcgatttggttgaagataagaaatgtcgtgtgcacatgcgcctttgatcttaatatcctatagtcttcactcttaggtccataaagcaataataaatacgatttgcatgccatactctctcagtcgtccgctccagcggaacggtccgacaccgccgtcggagtgactccgaggtatctaggccatatatgatcttccctggataatacccagactactataaacccagcatgttcaaacaactatatcgcctaccatgccggtcaacattgacaccattagcacccggtagccggcggtatttccagaccaaaaggcaaaactccctaccagccgcatactaccgcggcggcacctcacgcgcagtcttcttcaagcaagaagacctacccccgaacaaggaagactgggctcccatattccgcagtgtcatcggtagtccagatcccaatggccgacagctagacggattggggggtggaatatccagcctctcaaaggtatgcgtagtcggtgcatcgacacacgacgaagccgatgtcgattacaccttcgtctcactcggtatcaaaaacaccgacgtcgactactccagtaattgcgggaacatgagttccgccgtcggccccttcgcagtcgatgcacatctgttcccattacaaaatcccagcccggattcagcctcggtacgcatccacaacaccaacaccggcaagatcattcattcgtccttccccgttgtcgacggcgaggctactgcgagcggtgattttgctatagacggtgtcgctggtacagctgcccgcatcaagctcgacttcatcgaccccgccggctcggtcacggggaaactcctgcctaccggaaacgtcgtcgatacctttgacgctaccaaagctacgtgcatcgacgtcgggaatccgtgtgtcttcgtgcaggcgctcgatctcggcgtgagtgggaatttgactcctgatgagatcactgctcatccggatttgttgccgcgcttggactccattcgtcggcaggcgggcgttaagatgggtattgcggatgagactgcggcagttcctggtagtattcctaagatctgtatcgtggctgctccttctactaccgattctagagatatcgagcggaggcagacgtctgttgatgttgatcttctggctcgtgcgctttctgttggacagccgcataaggcggtcccgattactgtcgcgttggctcttgctgctgctgttcatgtgccgcagagtacagtggctggcgttgtgagtgaggatcctgtcgatagcgctgggcttactattggtcatgccagtgggaatctgttggttggtgccaacttcgatgcagatggcgcgttaacttctgccacggtctttcgtacagcacgtcgtttgttcgagggacgtatttactggaagaacgataactgagcgggtgaatgatgttcgattgtacaatataattggcaggaagagtacatgcacacatgtatagccggctgaaacaactgaaaagaaagacctgatcatatgagatatgcaaataaaaacttttattcttgtgcttcacaagtggtatatctatatcatgatctatccccagctttaagcatgtctgccgagatcaatatcagcaaccagcttcatatcatcagtaccagccccgtcacccagcccaaagaacggcttgacagcaacatcaaccacctcctcaaacaaacgcccaataacagcctccttcagatcctcaccagtctgcgcgaaatccgggtacgcgttgagctccagcagccacacattcccaagagcgtcaacgaggaaatcaacaccaaacagctcaaacgcattgggcagagtctggaaatgaaccatcataccgcgggccgcagcctcaaacacctcaccggtcaccgagcagatctgatcaaagatcttctccttccagtctgcactgaaaccggggacgtggtggtcgagatcccagaagcggcgcacactatccttgttcgagctgccgccttcctggaaacaggtgttggtcagatggcgcgcgaggtcggcgacgtcgtactcttcatgcggagcgcagtagcccttcgcagcgaagagcgcgagcatctccttgaagacgtagactttgagtgatcccgaggcgaggacataggtgcggatgtggaatttacggtttgaggatgacgggaggaggagaggtgggtcaatatagggctgtacgaggaagtggcggagctgcgaagtgacgatccctgtgtctagggcggcgctgccgtcattcgcgtcgtcgccatttctctcggatccgctctcgtcgtctgagtcttcttcccactcctcgaagatctcgcgtagctggtcttcgctgttgaagatgcggattccctggcctcgatcgctcatgccgggcttgaggatccaccattccttttcggagtcaggtcgatcttcgttcttagctaagctgtcgttcaactcgaatgcttctagcagggcgtcgtcgaggaattcggcataatcgagttcgaagtcgaaggcgggcttgaagtggtgtcgaagagcgctctctgggtgtttcgagatccaattggccactgtgtttgagagatagtgcttgcgaattaaagctttccggatgatgtacgcgcttgaaagagacgtcgagggcctggacatgatatgctcgaaatcgaggcgctcatattcccggtactggaaaaatggcgcagatgagtccggcagctcggacacagaagacacacgcttgaaggcacttcccaggcgacatgttaatgcccgttcaaccatttcttgcacgtaggagttatcgcagtcgacgagggagtacaacgagggcggattagccgatctacaagatctccgtctatcagaaagggtgccaatacttaaagaaaatcaaatcaaaggggaggggatatagtatctaacagctaagccagatatctaaggtgggtgcaacatatagatttcggatagaaccctccataccatgcatggcgtcaaagtcgtcactcacagcttaatctcccccgaaataccgggcgcgggcatgaaattggccctgaggggcgtgacgctgtaaaagtcagtcgatgtccaaaagtaagagggcattgaacaaacctagtcatttgctccttaacagtccagccatcattgccaggctcactttcctccacacttcggtaaacatcctggaaactcggtgcccacttgaaatgcttgtgctgaattccggatggcttctggctgttaccgacaatctgatctggttgctttcctgccatttcgccttcgttgcgtagttgctcttcttgcaaatcagggtcgtctgcgggtgtggggtcgacagcctggaagcaactcccggatgtccacgtgttctgcagcatgtcggtatataagaccttgttcttactaacaccgggttcgaggggaacattgacgctatagaggtgcaccccatctgcccagttcgcgcaaagatgctcaatcaacttgactgaatggcccgcggcctctgcgatgataacagggtcatggtttcgagagctgaaagcatacgacagagcaattgagcgcttgccacagcaggcaccttccaacgctgcgccaatggttccgctcgacaatgcgaataatgccgttgtgttgcgaccatagttcggaccggagacaatcacatcgacagggccatgttctttaaagtagtggtataggccgatctggacacagctcgcgggagttgagtcgatcaaaatccactcttcgccttcgtcgtgttcaccatcactgccacggggcaggttgtgtgttgtcccgtcttcttgatggagcgtgccgggccggaagtaggtaggtttgacagaggcgcctaccatgtgcgctttacctatccatgatcgttgctggtgtggtagaatgaccgagaccgtatgacctgcggactggagcgagcggacaagcgaatgcacgtacggcgatgactggtttgacggaggaccgtcgtcgttggtgacctagatagagataagtcttcaagctgacattgcagtatctatatctgcttaccaggatatgcatttggggtgaagtggttgagatgtgaaggatggaggggaagaaagttcccccccgctttgcgttgtcgcaatcggcccagatgatccacaatgtcattcccactatcataagacattacaacatatagtaccattcagctcagctaggccaatgaaaacacatcattgtgattgtgtcaaatgactgcgccgtctctgtactccacgagcttctgcgctttctagtccagagcctgtaccagcttcatcaacatcagccggatagcttgagagcaacctcctctcctgctcgggctcttcctttttgacatcggaagattcatcagaagtattcccgtcctcggactcttctttgatagagtcctgcggctcctccttgatctcattcttaggcatagtcccccaaatccaagtcatggccagccacgtcaagccagcagagacaatagagaccgaccagaacaaagagctgaaaacaacaaaagacgtaatcttccaataatacataatccatctatcatctgttagccatatcccacaaaccacctaatccccaagaagacctacctaagccctgtaagcctagcacggaactccacccgggcagtgtaaatctgcatgtccgagtaactttggatctccagcctcagactctgcggcaagttctgcgcccccttcgcaaactcaagctgctccatcatcggcacctccagtgtctccgactcccggcgccagccaacaacatagagcggcatacgcgccactctccgggcaacatctaccagcggcgaagcataagtcatgatagcagggcggcgggcctgcgagatcggggcgctattcgggccgagtaagagggatgaggcggggcgggatgagaagagggtgaggtcgagcatgaagttgcctgtatcgaggtttgagggtgtgcgtgggagctcgagcgtcacggatacgtcgtagggctgaagagccacaaattccgagtcaaaggttgctgtaccccaggggttgccatcgcttgcacaagttagttgagctgggtgtctttgtggggaatgttgttatacccaaattgtagatggacttcgcgttgtagtccgaccgtgggaataaatttaaaataaaaaaccccgtaggcaattgcggagatgcctattaggaatgatgcggcgcccatgaacaacagcgtgttcaggtatagccgtaaggcggacttggataccagcgcgcggaacggcgcgaggatcgcctcctgtcttgtgtcagttgcagctgagaaatatgcatcaatacacccaccatgatgatttccctgacagaagatgggccatattcggactcgtctccaaattctgagtccgccattgtaggagtagttggcagaaacaacattccgaaattggaagttgaggtcatcctgttatctccgttatctacaccgaggtctgcgtccaagcttcatatatgcctacgataatatttaccaactcctagccctttatttagtaattgtccagtgatggcatgtctgacagagctaaacatccactggttaccgcagatttacagtagagaagttctatttcttcattgtgctgtcaataaagttgtatacctacatttgtatataaacgagaccttcggggctcatgtagggatacctagattaagtctagagcggagtgctagtttgacgataagcgacaaaagaagatgtggttcattatactagaaaacgccatacggaaggcccaaaaagaagctacaatgatcataagaatagtaaattagcatcgccccatgcagataatgaagacaccgccaactccagcttttacagtcttatcattacaggtcgcgggcagcatgagacgcgaaaaatatcatggaacctcaagtcatgcgaaaatcgtaagagaaaaataaatatgcatgccatcaccacggctaacccctgccgtaacatgaaactgaaaggatagaatggcaaaaaacgcaaaagagcaattgcggaagagaacccgtgaaaattacatgcaacaaagtactcctgtgccgcccgagttatcagaaagaacttgaggagagacatgaatggagaggatgaggaggagaagccaggaggggcttaggcgatgggccgagggctctgttgttggatatgttggagaagagcgtcgaaaagacgaccgatctagagagttatttagtatcgcgacactgtggaagattggtggtaagcttacctcaggtgccgcctgaatgaaggggaggcggaagaatgagtagctccggttctggaggagctcctgcagggtgatgatcagaccccatggatgcgggcggtgcacaatcagtcgctccaacaatacgcgaatgatttgttggcggatatccgagtcatcttgctcagagtaatccacaccaaacagacggagaatagtgaagctgaagaagtaggtgtggctgttggggtagcggagctggttggccattgcactgagtaagtagtagcgactttcaggacgcagaacttgggcgatcttctccagaagagcagcgtgagtcgagttctcaaaggcgctgcgggtattgcccttggaggcatgctccactgcagcttgttggccaatatacaaaacaagcgcgttgactaggacgacatccacgtcgacggggacaaagaggaggccagtttccttgaattcggggttaagaatggcgtcacagagctgctgaacagcagaatcggagatgttgtcattctggagtacatcatcaacaacgtccttgatgttggcaagctgcaaaggagcaacgatatcaccggcgatcttgggaatttcccgcatctcctcgatacgctcgaccttcaatccttcgcggaaaggatcgggaagtttctggaacgacgaggggtaggcactgagaacaagattgcggagctgagcgcaatgagccgggatcacattgcagaactggaaatggttctcagccacgaactcggggaaatcgtggtgcagaatcagcaagatacggagaacgcccttgtataggtccttggcaacgtaggtaatgttggcagcctttaattgctcgcccatgtaggatagcaatgcttggatgatctcgcagtaaggcgcccatcctgcacgatcaggcatgttgagcatgtcagacatgaacacgcggtgagagactaagcaaagccagccataaacgaacccgggcacgtaacggggctggaaggagaggaatttgttggccaaggcgaagatcattccctggtgctgctcagtgtgctggaggccgttcatagagtactcgcacagaatactcgagaagagacggaagaatacacgctggttgaaagcttctcctctcatgacctggtggtgattgaggaccagaaccaagagagacagaatagagttgaagtacgtagccttactagctttgacggcgccagcggtctcgccctggaatctgacgagaagaatcacgagcttagcgagggcatcgatgtaaaggaaggcctcatcaaggctgccgccgttggggttctgagactcatgctcaaacatggcgacggaaatgtcgatgctgagacggaaaaatagtgctgagtcctcctggctgttcatcacttggcggttgtggaggtcctgtaggaaagagtggaaggtgcggtcagtggcaccgggggccttgtaaataccgatccactcgctgaagatgtactccatttggtctcgcttggacctggcttggtctgtaaggagagagttgatgacctcgggaataccggactcgcgcagctttcgcacgatttcgagaccgggagcaacgcttccatcctcagcaagccattggctcatagcatctagactgccggagaagtctgatcgaagtgccgatggttcttcgttgaaaagaacgcgatccatcaggttgcccagcaactccaaagcaggaacattcctagatagaatgagtcgggtcaggttcgtatcgacccgacggatgtctaggaggcctgcgtcgatgagagcaacggtgaccggcacattgaacatgtgctcatcatcaacttcggaaagcagtgcccacgtgtaccgggcaatgagactggacatatcgcatagcttggcaagcaggtgcacaaggacctcaatctcgagggatccatgtggctgggaatacaaaagggtgcaaaccttcaaagaggttagtcgcgccaactcctctccattcgtcgaggcaaggatgctgcgcagtgcctggttgtattcttgaagaactgcactatctctgccaagatccttgacgtgttcttcaggggcgctgcgagcagactgctggagatcggagacgaggctttccactctttcccgggggctttgagcatcaaggaacccattagtctggactgggggcatttgagaaacagcaggctgtgtctggggagttctgtgaggaatggctggctgctcagccggggtagaaaggtttggaatagcaggataggattccccaagcacgtcggggagctgacggccggccgatgcatcagtggatggcgccgggcctcgggattgacgggcaaactcttcgtagatggcgagttgctccttgttgagacccccaggcgtttgccggtaaggctccggaatgaacaatccccaacggttcattgaaggatcaatgaaaggatcgttagaacgactggccagatggcgacgacgagcctccaattgaggctcaatcaccttctcgatctcgggcagggacttttcctctgcagctttctcgacaatgccacaggcagcatccaggttatcgttgacacacatcagaatcaagccttcgggcataggctgctcggagtactcttgctgaatcatgcggatatagttagtcatgctaaccttcagaggctctttgcaggtgacgagtgccaggctaccagcaagttgtcggaccatgatgcccgcggcgtggcgcacgcgttcctcatcgggttccatggcaaagtccttggagacaagttgtacggtggagatggatgcgatggtcacagaacgctcgactacgggggtaatgatctcggcaatggcgcgctcgactgcagtatgcacaatctgtttaagaattgtaggatcgaccatgctgctcgccgatgagggcaggacaaggatcttgtcaagacttggcagtgttgacatgatggcggcgggggacaatctctcattccggatggctgggttaatagcgctgagtgacaagtcttcaaatggctcaagaccttccggagcgttaacagttgacagttgttcctcggcatgtgcagcacgatcgcgaatgacgattgccggctcaattgtcttatggtcgagatcaagatctttacagagaacttcgatttcaaacttgagattgagctttagttcggcgaaatgataaagctccaacagcaggcccaaaatatccatcagccaggggttgggtggtttgaagactgtggatttggtagcctgcacaagaactttgcaggtgaaggggattgtaaccatgaggcgttgagtgtcgtatccttcgaggagcaagcccttgaagtagatgttcttatgcttaataggtttgtctttggcaatagtcagtgagccaagccaagcaccaaggttcttcaggtggccgcgatcggtagacgaggttaaggtgccttctgagttaatcaacttagcgacactaacataggtctcccgtaagacctcagcccagaggatcttgtcaccaatgcgcccaagaagatcaagatagagctgctggaaattaggctgcaacttggcacgttcttccaccaggtatgcggcgaaccactggtggtgctggtcacgcaacacttctcgtagatcttcaagtttctcgtcaatgttctgctcggaaacattgttaagaacgaaaagaatcttgtcttgaatgtcttcatccggttcttcgtagagctcagatcgaagaggtgggtcgagttgaacagcacggaacttgcgcacggagccatcagcgatgggggagtcaacagaattgccattggtcaaaggcacagaagcaagaccatcgaatggtcctgcctccgcttcgccaatctggtttccctgttcacggagcacctcctctgccttttggtatatgggtgtgccttggagagaggggatttggaagagcaggtggcagaaaccagcccactcgggaagacggttaatcaactgttcaatcgcttccacgccgaacttgtacatcgggtcatgaggctcatgctcgcggacagcctcgaggatcataccgagaccgaccttcagcgtgatgccatcaacaagacggaagttgattatgccaccgaacatgaccgcagtcttcgtgagagcctcgagcgggtattcatggtagcaatggtattcgtcaaccaggccgtgcaccatgcaggcgaacagatcttgttctgtggggtcgcgcgaagacttgtatttgcgcatcaactccagcatctcacgcagcgagagttcctcgtggtacattttaccaaagagctcttgcatttgcttgtcaattgactcaggcaacgtgttaccgttctcgccattggcgtcgattatatcatcgaatccttcgccgtagttgatcagacgaggatacgtctggatgcaaatgcgctggacaggggtgagattttcgcggtccccgacgtattcctccaatacagacaaaagcgtataaacagttttgactgcgaggctgaccatttgatgagcagactgctccttccgttggacgtgcaattcgtcctcggccttgattcgcaggaacttagagagcagaccacccatatcaatagcgcctttctgtgcggcattccgaacccactgctcaagatcaaagggactcttgcggtgggagtagcaggcgagatcgagggcaagaccgttagtgaacccaaggagataatcgagccatccgtatgctgcagcgtgctcatagatcacagcggtggaggtgggatcctgagtgaatgtggtgaaaagttgttctgatacccactgtcgttcttgtctccaagcaccttggagagcgagctggtacccatcctcttgcttcgagatgaagacaatgaatgtgcgcaagacaaagctctgctggacactggtccacggctgcggaatagccagagcagaaacgaggaaaaccggcaaatcaaactgaacgaccgcctttataaggagctggctttctgtcgcagcccacgaagcctgggagaacaaggcaaggtcgaaaattgccttcatagcgtccatggaccgaagaggtgactttgccgcacgctcgccttgcaatttgacgatttcaggggcatcttcaaagaagtcagtggggaaagttgcgcgaagattagggatgtgcgatgggtcgatccgagaggccacaaaagctgttaggaatgacatctgcgtgtcacgatgctcccagtctccaccccaaagcttttgaacatccaaagaggagtcgtcgaccgacatggcggaaagaacattgtacaacttggtgaattgtttcggatccactctgaggccctcacgatcgaagtggcggaacacgaggggccagtttattggcttgtcgttatatgcacttaagaatgtctctagtgagaattgttcccaatattgcgacaagatcatgaagagaagggcgctggctagatgttcttcgctccaattcctctggtctgaatttagcaattcacttattgtctcggtatgcgcagtggcacgagctcccttggcatgaagctgtcgtacaaggacatattgagggttcacaaaattgaacatctgtaaagcagaggaaacttcgaatggcatatccaagccaagtttttggaatcgcagattggctgcgtaaaccagcttcgccttgacatcgtcggtaaaattgcggggagggtataagataaaacgttcaatcgtcatgccaaggaaggagttgctgtaatccttagtcacttcggtaggactcgccaagctctgtaagaaaggggcaatggaattcgagaggatggcatcggctaatgaggatggttagatcgacccagaggcgtagataggagcaaacatacctttagcacgaagatctgacttgctagtcagtttgaaggccaatgcaagggaaaccttgacaactggatcgagtcggaaatgatctaggaaagtggaaaggtcgaagtcgcggaagatatctccttcggaagtatctactgtctcggcgattttctgagactgctccatgtccgaggacactttctgcatctcctggacaaggagagggtagttgcccgcattttcaacggatttgttaacaccggggaagatttgaggcgcatttcctgttaggaggcggcgaaagtatttggaaaagacctccattccgttcgaagtcacaagctgcggttattagaatcgactggattgggatatacggaaggaccaccaaccttgtgtatctgggcagcctttgtctcccacttctcttttccttccttctccgtaatagaatccagtaacaagaacacctgggcaatagatattttggtgagcgacgattggctcgagtgggcgtttgtagaacccggcttgtcagaagcaaaacctgtgggagaattcacggttgttccggacgagagcggcgaaaagacgcctcgggaagatcccggcccaccacctcctcccccagttcctcctccacccggggcggagcctgtagcagaggccaaatgggaccctatagaaggggtgtgagctcggaatttaggggacgaaagggttgttgcgtgctgttgcgagccagattgcaatgatgtgaagggcgaagacgtgtgtttgggacttccaccagagagacccctagcagagctcagcacggcggagaaagaagatggtgtcgaaaccccaaggcctgcgtccaagccccgggaagccgtggggggagcggcggaggatatgttggtcgcgagtggagtcaacccacgacgtgcgccggactgcgacacggaccgaccccaggcaccaatatcggtcctggtcgaagaagatttatcggtgccagaagcaatcgacgattgggcggaagggtgagggggagggaaggtcatctaggagacgcgatcatttgatctcgaggtccaaagacagatttttaagtcacaggcgcaataaacggggggaaatcgatagagcagatcaataaaatagacgcgagatcgtgcgatatcgagagagggagggtgtcgggaaagtaggataacactgtgggagaggaatggatgggggaacgatgagatggagaggttgcgagaggaatggggtgcaaggtgcgagttgtcggaagtgtgcctgcctcaggtgtcgagtgggagctcccaatcaggcaccaaagtgcgatacaaggtacgccttgcggtcgttcgagtgtggaagaattgctgaagctataacctgtttaagacttgatgaatgtgtggtttttgctccccttgctgttcattgcccatccttctcccacctacatgctggtgtttggagatggtcacgtgcaatgtcccctgcacgtgatgtatggctgagtcatctactctggggtccacctgccgctgcacgggtccgtgaatgtaccctaatgaagcaagacctagagcaggtgctatggagagtaatctgagcacagcccgaggatattcgagtatgtatgtatttacaatgtaggagcatgtaatatgtcttcaaagtgagcaaggggttttcaatgatttatgctatgtcatcctacacagcaagctaatttgtctatcctgcaatatgatggatatgatgatagaactgcttcgtcgttaatgctaagataggtaaaattcaacctagcatcttacgaatatagtaaatgagaacgatatatgatcaagcatatcgcaggacctgaaccgtaccaatccaatgaacgcctgagttaaaatccagtaagaagagccgatcaacagatagagcaaatataacccagaaaaatatgaaagaataacccgcaaagtgatcagagtcatgtcatgccgcaatgacagtcagcaaaaatggcgggggcataggaacggatgatgcaagaaacgaagcatcccacaaggccagtagcttgtggggacggaaggaagataaaatcacacagtcaagaaggaatacgatcatgtgcacatgagtttgagaccagttcgctggccaatccaacgccaacgcctaggtccaccgcagaagagaccacaatgaataaatgatattgtttcaggttgagtccggctagtcagtcagagacacacagtagcacgggctagcgtaagatgcctgggcagtgtatgtctgggcagtgccgcctttataattggtgtaggtagtagtcggcgtgggctcgttctctttgatgttgatgatgctgcctgagagaagcgccaaacccccgtcattgcgaacttgcatttgctgacagtagggagattctcgtgatgggtcgtctcggcgctcctccatcttaatcctgcgtggataagcgtaggtggcggaggagtcgcgtttagcgtcagcagtggagccagctgtgcttgctgccatgttgctgttgatagaagcagtggtgctcaaggaactcgacgtcgactggttgacgtacaagaaaaactccatcattgtgttattccaccaacaaaaccacggcttgtcgccaatttctgcggtctgcttcaaattcttgtaggcatttgcatttgcccatccgtcttccacgaatgtgcgcttagaaatggagttagagaatgtatcgtccggaacaatgaccaacttgtcgaagggagcaaggaagaacagagcaggacccatgccaatatcagtggtatcaatggccatactcaatgcttgtgtaggcgaagaagaccaatacggcgcctgggcaccatatgtaaaggtcggggtcggaacaccgtcgtcgaaaacgatggaatggtggccattggattcgccgataaaaatatcgattgtgctcggtgattgcatgcatttccaggctttgccgtaattcgattcgtccacgcaaagcccagatccattctggtaaccggaaggtaccgtgtagtagcccgtagggactcccttgagacctgtgggggtggatatcattgacgcatccatctgaggggttgcggtgaccgttatgattggtaaagggctggattgttgggcctcctggtgttcttgctttgcagcttctgcggctttcttggttcccagaacaccaccaatgacgcctccaatacatcctccaatgagcataacagttgcaatgaggaccaacgtccatactggcaggccacagcatgcggtctgtttccccttgcgtttaagcttctcttcgaaggccatgatgcctgtggtcgcagcgactctttcctccccgtgcccattatcgttcccatcaccagaatgttcaagcaccaaagcccttgatgaggtttctgaaatcggcgccgctcttgaactttcattgttgagacggtgttcctccggcggaggatcgagatcgactaccgtctcaggccctgggggcttcggtataacaccagttggatagcgtgaatacggtggtagcggctctgcgtgaccatccggtccaatgatatcacccacatcatcagcctggcgaccagcgggtggttgatatggtgggttatggcctggaaatccgactgggatgatatcgtcatccattccttcttcgaccacattttgcgagtacatcgcgtaggggtgctgcggaccggttgacccttcaagtgggcgttcaattgggcggatcgtcgaagtactacctacactgggcgaccggctaaccccaacttgtggatacataccatatggatggctgggtccggtggctccggtgtaggggctcagagcgcggggaatcgagaaacgagaagaaacgctctgattgcgctggatcatagaaggcgtcgagttgagagaggaggttgagttacggttgttggcgaaagcataccccttttgaggcagacttgaccgatgaggttcatcgaaggacacccgagcgtcatcagcgaacgggttatcgttctcggtcgggcccgtgctaacagcccttggctgggtgttttcccgaagagtagaggaggatgcaatggaagagggactgtgggggcgttcaatgcgatcggagtcaatggtttctaatgagtattcgtcggcgaagacatttggattggaggtggaggtgcgaccgaaggagcggcgaggtgtcgaatcgctggagagttgtggcgtttgagaggattgtgaaatagagcgagaatgctccgatgaaatatgaccagacatttccctatcggtctggcagccctgtcgggccacctcgttgtttgatcaatccgtttcgctacccgggcgaggatgggcgaagaatgggcggcagcaagcagatatagcagactctgtcgagatgttgaggaggaggaggaggaggaggatgttgatagatgatcgagatagaatgtaggatgagaaacttcaaattggggaaccctggaagggaagggaggagtttgagactttagtgtgaccagtttactgaggggagccgggggagagtcaactctcgggccaactgaaattcttggctttttgattttgcaccgtcttgggggcttttttccatggactctttctttttcttttctttcttctcaaacattctcttgtatcctggtatcacataccctacgatctactccgtgcctgggactcctctgtttgcgctactacgactagggtgaccaactagcgagcacttcccgtctacggtgggcctgaatgggcttcgccaccctgcatgctagtatagtgtgctattttgatattctcgagtatctgccagtacacagaatacagaatacagggttccaggtccctgttctagaccaaagctctaaggttgtttgcttctgcatgcgttggatttgaaacgttttctttctcgccacgcaaccacgtgagaacccctttgtgtgtttgggtctggaatggaatccactgaactggagaactgcaccttcagggcctccagtctgggcctccagtctgggttcgcgaaaaattccagaatacggaaggtttaaaacatcagggctgagcggatatctcggacttgcaaactataatcgtaaaccgggaaatgcacaattgctcatcatcatgactttgatatgagctgatggtcctaggacgtctcctatggacagatcttgtagcgaaaacaagggtctctttgaatgtaacgatgttggcgtaggtaaatacctgtgttcgatctcggataattacgattggagtatcttggctctacctaggacttgcagattatcaaacaccgcatccatggaagactcccacccagaaaggttacgatattcgctctcaacagagatgtcccgaacaatgaccgtatggatcaacggtttcagggccgttcagggcttcttcggtccagcccctctggaacgagattgcgtgcgtaacgggatccatccagggccaaccccatctgactccatctgactccatctgatactgagatcgggttttatttccgtctggtccctatgtatgtaagaacatcccagagaacatgagatggttccttggactgatcataagcctccaggacttgatctagatctataatatcgtacaattcggtatgcaggtcacatgtcatgtgggacatcaaagaactccccatgttctccttctgtatcagcagataccagaaatttacttcataaattgacatatgttgaaacgatactgtgtagctaatggaatgatcattgatagcctacgtagatactatacaaaccttcatcaaccatatttccctgccaagaattgcataacatatcgcgaggaggcaaagtacaaatcagctacattccaatgaaacaaacctgattcaaatgcttaaggatgtaaaaacatgcaatgggtgattgatcggtctacaaggttttcggccccatagggtcaatatgctatcggctaatagccgacgcatcttatcagaccgatacatcaacatgactcaggaaatccgtcgttacatcccatgacatattcagcttgacacaagccgaacagcgtaggacctctcggagatatatatctacacatgttcttcgtcctaggagtatgtgaatcctgtgacttggtgtacattgagaactcaatatctcgattcagtatatatcctcagtcattatcgtattactagcattatagttaactaactagatacttcaattgacataaagaatcatgattcttaactaactaactagagcacccgggtgttagtgatagttttggcgcactgtgggttcgccaagccacagaccggttatgggcttggccgtctccaggtggcacagacctcatctattccctccttcggtcagccaacattttcatttaatcttttccttattgtttttgaacggcgaatttcttcggagactccccattgctacaagcgtatcacaaattctctgtatccgcaaaccatcggtctgttccgggcagtctgccatgtttggtcctcccatcatttgtccaccagtccaaaagcattccgcgaagaattcttccaaaatacatcacgatgatggatgtaagtgaagcctatcaaaggctttaattacaaaccctgaatatagttagattcaacgaggtcaaccgtttagaggaacgatatgtctagtttcgaccaacagagctccaacggatcgccggcgaagtattacaacagggctattgccccaatgtcaataagcacgctggacagactatatatcagtccccaaagaaactccacagggcttacagcctcgaagttgtggatttttgtcactgcctcattgccgcaaatcatcctctatgcatcgcagcacaactcgcggtcataccgtatctcttatagtgagcgtgaaagcacctctctacgtaattatattcttctccatcttaggcgtagtatttatatatcgagcacaccgcatctactttcgtgagcttcaactattctagtcttccagtcgacgaagcacatcgcgttgagcttctccagcttgatctacggagcctgctacgccttcgcgtttcagttcctttcctcgctctcgctatgattttttgcccggcttctcctatcccgttctcgaatacttagacgcagacaacattatctgcgggagtctctaggagccgatacatttcttgcctcgatcgcggaagcacgtatattagccaatggggtttcctaaagagggcttactcacacaaatcagggggatgtttatctttgatttcaaggtccgggagtctatattaagaaaaatatatctttcatttcctatctaatcccccttactcttcttccaatcccggtactcagcgataataaaatatatctgtgcagcgtattgtgctatcacccatctctaggcaactgattagcgatgttttttaagcattggtatagtgatcatgatcaaacctaccttctaagtcgattatttgaactcttggttcctttgacccttgaataccgagagttgtagtaatccatggtagtatttcaagtcccttttgcatcaatacttcttttaccaaattcgattacagagccctaacttcaagtaggacgggatctaccagaccaccgtcgtgcttaacggagccgtaactgcggccaatactctgggagactccacatgtgttccatatttcgcgggacgtcgcaatgattcgcgatctcactctggccatccgtctgcgggtggtagacagttgacaattttgattcctaggatgcgacagaattccgtccagaattcggagataaactgaccgcctcaatctgagacgatagtctcggggattccagtgattcgtatgacattgtccatgaataaacgggccatttgcttcgcattggtatccttatggcatgggatagatacgggtctcttgcttaaccggtgaacaacgacgaataccgcgtcggctgccatagtagtgtggttgaaatttgggagataccagagagatatgccgtagtgatgagggtgactcgtacaccaggcttaaacataccttaagcttcacgatgcatagaccctttttcatattcccataatttaaaagcaaatgaaagtttgagagtccgtggcaaaagataaagaggagaaggggtgccgaagttttcttggacagcttagaagccctcttcatttccattaaaaactggtcgatcattctcgctgggctaactacagctgcaggcgaaagtccctcgctgtccaggagttggcttaggcatacttttcgttcctcatagttgtcgacagggttggtgacgctggccaagctacagacaatagtcgaatgatatactgtaacttaagcagtatttttgatgtagatgagagggaaaagaagagcaatcagagagtagaatcaacaaagtcggtatttatagatgggacaggtactatctacactagtagcaataggttatctaggcactcgaggtagtgtgagtctggaaggtgctaagatgtaactcgtgagtgggcaagaagtgagaaagaagggattgaaatcatataggtattaagaatagttttcttatgttttaggtctcatgctactttgttagcatcatggcgatgtgacacagatatcaccatcctaggattttaccttactgttgccgactcaaggcttacttggcaacttagtaatcgagtgttgtcgatggcgtgaattgatcgaatgcgatggaagatagcaaaaggagagtgcaataaagttgatcggtattagtggcctctaactagaaagagtacgtaccggatcctaaatgaaatagaaagggtagtgtggccagtctactcaaaagagaaagagtgatgagttgaataaggagcacccttggaatttattactcaggttgcgaatacataaaatgaattccatgtttcccatccatatcatcccttcaactccgatgtactctgtacatatctctctggctttgagcaacatttttcagtaccataataatttaactttcaattttcctaaatttgatatataggggtagagtcccttatcaacaaccaattagtgagaatggaaattaagcaataacgcggttgttgaaatatgagattgtagttatggatgtgatgggccatggcagtgagatagttatgttatcgataagtactaaattaagggtattcaccgcctaccccttgagtaatagtactaccgtgcacgtgctgaagtatatagtgcccgctgattgggtaaagccccaccgcctactatagcgcaactaaggtatccggcgattatgaggtttactttcctagctcttccagcactactgtcactcatgatttttatcaaatctcttcatcctaattgtatttgaggctggctacttcctttgcagttacacttgattctcatcatgccggacgagtcgaagggaaagagcttccccgacgtctctgcgaaactctccgcgcttccaaagaaatcactttttgagcgtcaaaaagccgaagcagaggccaaacgcgcccgggaaaaagcagagacagctgctgtctatgaagaatttgtcaaatctttcgaagacgaggattcagttgcaccacagtcatgggatggaggatccaatacatttagaggcaggggtggtggtcctcccaggcgtcatttcgcaacttcctcttcacgcggcagtggtcatggatctcttgggcccccgccgccgtcactttcacacaaacgttcccacgaaactttccccccctcccgtcgtgaccatctcaaatttgaaaacgtacttaccccatctgaaaccgacagagcacttgacgaggaggagagggcagctccaaaacccacgctatacctcgcatcgcttccccccgggacatctctgtctgtgattaaggcattgatcccctcgaccctgaccgtggacaatgtcaagatcatcaccccacccggacaattgccaacccaccgcgagtcctcttctgcactcgttaccctctcaagcgactcggccgcttctaccatcgacgcagctgtaagcacgctgcagaacaaataccttggctgggggtactacctgaccctctgtcgacatctttcctccattgcaatcaattcaaacatgcctttgccctccggcctctcgtcgactactacttctcttccgtttggcgccaagcctattccgccgagtctgggcacaagcttgagtcgagctccaccaccagggccacatcgcggagggttcgcacccccaagctcgtatggaccaagcgttggtagaaatggcccaaccactcaggtgcaggtggagctaccgacagatataagacagttaagacagatacacatgactattgaaaaactcgtgaaacaaggtcctggatttgaggcattgttgatgagtcggccagaagttcagatggacgaaaagtgggcttggctgttcgatccgaggtcgcctggtggtgtatactaccggtggaaattgtggcaaataatcacagaccctaaaaagaagaatattgataagccggcaatgatcttcgaaggtggtccgctctggttacccccaaaacagcatctcaaatttgagaacgtcactcgactggaccaatttgtgtcacaccctgactacgactcctctgacgaagaacactcggatggagaaaatgaaagacggaatcttggtggagcacctcaggacggaagcaacacacgcagcgatgaacctaacttcttgaacccattgaagatggccaagcttactcatcttcttgcacgacttccgacgacccattcgaagctccgacgaggagatgttgcgcgagtcacggcattcgccatcgaccacgcggcagtgggtgcgcctgaggttgtcgacatggctattcgaaacgttttccgcccactagcttacaccggcgccaacccaaatagggaaatggaaaaaagtgccgctagactagcgaccacagataaggacaatgcaactccatccgatgaacaattggatatgtcttctgcgaagctggtcggtctctatatcatctctgatattctctcgtcgtcggcaactagtggcgttcgccatgcatggcgataccgccagctgtttgaaaacgctctccgctcacgcaaggtgtttgaacaccttggacgacttgataaggacctgaaatggggacgactgaaagcagagaagtggaagcgcagcgttggcgcccttttacatctgtgggaagggtggtgttgttttacgcaattgaaccaggagcatttcacccaagtgtttgaaaagccaccgcttacggaagcagaattacaaaagcagaaggagacagagaagaccaatgcagatcaagctgctgttgcatttgccaagagcaagagtcgatggaagacagttgatgatgagcgaggtgggaagtttgaccctactcgccctgcgaacgagaacaagctatctctatctgcccacgcagtggacgaatcggtgcatgaaaaggacggaactgctatggaaatctgtgagctgaagaatgttgatggggagttcatgcttaaggcgccactatcgggcgatcaagatacccaaaccgagattccccagacactatctcagaacccacctcagcacccaacccaacctgataaatccgaacaatcagctgggcagcaggagccagaaacacggcgacggaagccacggcccaaagctgaggacatgttcgcctcggattcggagtaaggttgggcattgtaattataccgattagcatcgaacgataccaagatacttgtaatgaatacaaatgaacataaatgaacaatgaatgagtacttgaaatgttttctctctatagacttgtgtagatagagacagttatactgaagacctgtcagttggaggctcttcagtacaacgtatcaggcagccaggcatcatcggcagaacatttcctgccccacaacccctcatcaacaaatacctttctcctttcgcgctcaacttcctgtaacctttaaatacaatcgcatcggcttttttctcttgtattccaaattcacaagttcttcataatggctggtatgtcttcctctccacttggttcctatatgcccctcctgaaggggatggaggggtctggttggatccagacagcagtgtgtgactagttgcgcaatgcgatggaaaagacgaaagaaacactgcaaacatacatatgagacactggctaacaaattgggcaatttatacagacttcaacgctattgcccgtacgttatacccacactttcctggttcatccacaaggatttagcaatgcgcctgttccccggagcctgtcctcctaggtggaaatatgcctgaagagatgggtgtcatattgtgtacaaataaccatgttctaacctctgatcgacctgtacagagcagtttgtgcagttctactaccagacctttgacggaaaccgcgctggcctggctggtctctacgtaagccccgctctcgagatattcttccaagtgtgtttatggactaatagcaattatcaattaatagcgtgaccagtctatgcttaccttcgagaccagctcggtccagggtgttactgccatcaccgagaagcttagcgttcgtcaatcccaaaggaatagcagaagaatatttcaatactgactgacttttgtgactctagactctgcccttccagaaggttcagcaccagattgctaccttcgatgcccagccctccagcggagatggcattgttgtgttggttaccggtgccctcctggtatgttgaatgcctatgacttcttctattttcttggctaatcaatttctctaccaacaggtcgatgaggagcagaagcccatgaactacacccagtgcttcaagctgcagcccgatggtgccggaagctacttcgtgctcaacgatgtcttccgtctgatctacagcgcccagtaaattatgggccccgaaacaaataccacgacgcgacgacagggtgatgtgctttcttgtgaagaggatatgccttgacggtggccgggttaagacatctgtcgttttgtcgcaagtgactcccctcaacttgcgatatgcccattgaaggattcatgaagaatttatttttttggaccatcgatcattctagaactgtatagcatttcatttctatcaagctaagatatagcacggtataaaagcaacacatagcacatttgttatacggacatcactggctctgaagcaacggcgtctcctcagatggtcgctcctcatgcacaggttcttgctgagcgctctcatcagcaggagccgactcatcgggctccccggtttgatcaacgtgcccagctttccccttgttgttggatccaaagtactcaaaatagattgccatcgtcaacaaggtaccctgcaagcaagccgtgacaacaagcacgccccagatactccagccactccaacccttacgggcagccaaactagcagcccagacaagacttccgggcgtctggatgcacatcatggggatactcaagctccccacgcaacgcagccggaaggtagtgtatatctgcgggaagtactggatcgacgcgaggatcgcagccaggataccgaggaagttagcccaggtcgcaacagcggccgggtagcgtagctcaaccgctagggaaattataattgtaacgagcgcgtgcagtagacatatccccgttacgatgagcgcggtgcggtacgtcggtccgctggaggtggaagacacactgcccaccgggtctgtgggggatgtagcgcgcgggaagtagatcacgaatagcaaaagactatgtagatatggtcagacaagctcgcgtgggtatggtatggtatggtatgggtgtgggtgttcaatcgggaattcggaatcagatataaatcagcgcttcgttcgactcacatagaaaagaaagcaagccattgcatggccatctggaatacacccagtagccctgcgaagcaagcgaatccgctgatatcccggcagcaggcgacatcttgtgcggtggatgggaataccaggatattggcgaaagctgaggtccctgatgttacacctaggaggataaagtatggtgagataccgaaggagcttcgccgggcgatgatacggatgtgttgggggaggtatgagaggaggatcccgaggataatctggctatggtacgtcagtgactggggactgattttaattctaggggcacgtacatagatagagcagtttggaagatgcctggcgaggccagctcgcggcagtagggtgttaatgagtccattgttgtgtctttataaaaggatgaagttcagatggaggtcggttgtcgggagcttgtgacgacagcgctgattaccacaattgattgcaccagttcgtcacatcggatattctgctttccacttcaccaagataagtggaattgctattttcaaagacagaaaaggaaatcctaagatatgtatcataaacttgaggacctcgttgggcactcctctcctctgtcatgttgccttgttgtcttgacgccttggtgccttggtgccttaaataggtggtgttagtctttttactatccctagttgggattagtgtcaaatgtctacaaccttatgtacatctggggaatataacatggattcattaccaccagaattgatttcccgaatgttggactacatcattcctgtcagatattcacgatctcccgacattcccctgacttcatatgccaccttgaatcgttgctagctgctacttatcgatcacctatttgtctgatccggggtacgcatctttagtcagcacctttagctgattatgtaacccacagttgagcatctgcccatttagacacttacactcataccttttgtcagtatcttattagttcacagtcctatcgctattgtgtaactagttatatgtgtactcatttctgtcatatgtcactaccgtacgggaatggcaaaataataactatggcacgctaaccgtattctgtaattcaccgtcatcagatactacaatggatgtttgtatagagctggaaatatagatacaaaagtagcatgtatacatatctacattctatacattaaataacagaaacaagctaggaattgttcccgacctggaataatgaattgatgattcatgcactcttagctcaatccaaggcaaattccccaactacgtcacttcgcaatcatccatgcttggctctttcttgcttctttctttaaaatcttgctgtgtttctattctcttcactgaaatattcatacttcacttgccaccaaaatacccctattttgtcaaacatactacaacatgaagttgaatttggccactggcctcatctgcttgctcgcttccactgaagtagtggcagcttctagctggtggaacaaggctcgtatgttgtcttgggtacaactatacccttcgcaagctaatatcatcaacagtctacaacaaatggcatgaaactgagctcgagcgatggctctccgaccatagtatggagcacttctctgtctagcagcttcaattactcacaattcacacagatattccctaccccagtcctgccgatcgccgcgatctggagaacctcgtcaagaccaactgggacagcagagtgcaaacaccccttggacaagctgtcgacaacgtcaatcatgagctacaccatgccagagaatggatttttgataggtagggtgcttacctttccttgttgtgaatgatagctaaccggtatagttggtctgactctcagttgaaggcattcctcgatcgccacggcatccctgccccccagccccgcagacacgaccttctagtcaaaaccgcgcgtgagaactatgagaagatcgctaccaaggttggccaaacggctgcctaccccggagactggctttatgcggagtggtccgactcggatctcaaggaatggctcgacgagcgtggatggccggtgcctcagccttccgagcgtgacaagctcattgcctcggttcgccgcaactcgcgcattttcagcctgcagacccagagcattgctgcatctgcatccgctgaggctgaggctgttaaggagacactgagtaatcagcttttcaatgcctggtccgactcgaagctgaaggaattccttgacgagcacaatgtcaaggtgcctcagggctcgaagcgcaatgaactcattgctctggctcggaagaaccgtcactacctttctgaccaggtgtcgagtgcctcctccgctgtagagggtgcgtttggcgctgctaccaccaaggctgggaacgaatatgcacaggctaccgattatgccaagctgaagatcgacgatgctttcgagactgcgttgaatggctggtctgactcccgcttgaaggcgttccttgatgctcgaagcgtccctgtccctcagaatggtaagcgtgatgaacttattgccaaggtccgcgccaatgcgcacaaggctgctggaggatggaaccagtacaactttgatacttgggataaagaacacctggtgtaagtacatacttgtctgctggttatgatctcactggcttacctttcctaggaactacttgtcgtccgtgaaccacaaggcgattaagcaggccgatgcctcacgcgaacagcttgtgaagagtgcccaggactcctacgccaaggcttccaaggctggcggcgaacagtacgcctctgcgacttcttccatcgcgcatgcaacagacacagccaaggatgctactttcgaccaatggtcgcactccgagctcaaggaatacctggacgactacggtgttccgacataccagggctcgagcatcaatgaacttcgagctgcggcccggcgcaacgcccattactataagtacggcactgcgagcccgcaagctacgatctacgccaaggtcatgagtgttttgcagtggtttgccgatcagttaaagatcggcgctgctagcggccgcgcccaaggcaccgaagctgctgaaaaggtccagaagaaggtttccgagcacacggagagattgcgtgaagaactttgaactaccctccttatatttgatctttcttgtttttgttccacaataatttgggatgcacggttggtttgatgtattttaaagttacgatgattatgacatttggattgtaacctgtgcttcgagttagttttgccttttgggtttacctagtgcccaaatacgccgttcgtacatatgtaaccacctttcagcataaaagaaacgatctcgcccacctttttagactgggtcttcctatagccgccgagacctctacttcacttgtgttatctcgaagatgacgcccgggggggggttgaagtcgaggccggcctccacgacttaaaactacaacacaacaaagaccatttccgactctagccttttcagggagaatcgggcgtctacgctccctacgccggtcgaggtgagaaccatcaacgaggagtcaggcaacatctgtggcacaagtttcaaccgacctccgcctgtcaagtttccatcgttgggcctgattgtcaaatatggagccgacaccaccgtgacagaggcagacccaaaatatggtatacaagcagttgaatggcaaagtaccagttcctgaggtgttggggtggaccgaagacggtgaccaagtctttatctatatgtctttgatagggcgcgaaaccttggagcaaatatggggtgctttgaacgactaggagagagaggctgtctgtaaagagctcaacggcatggttaagtcttggagatcgttagaacagcccaaccaagtcctttatgtgggtaagtctcattgcggtagctacgcagaactatgctaaagtgcttcctaggtggcctaaataatcaacctctaaatgaaatctttttttttggccaccgcgacctggctgcccattctacggtgcagacgccgtccaaaaattccagaatggctgcgatatcgagattgatggggaggtgtctatggtcttcacgcatgacgaccttgtgcccccaaatatcattttatcgcccgggccgaatccagtagtagctgccgtcattgattggggccaggcagggtggtatcctgcttactgggagtattacaaggcgcgtcacgtcaggccgaatccggaatattttgaagacttggaagaagaatggaggacgagatacctgccaactattctggacctggtcgatgatgagactgtataccacctttggctgtggtttgtcttgcctgagggtttctagttatgtgaatgaagatgtgggactatacaaccgtggtagatagacaatatatatgaattatgtatatactgtatccctgacagtagttcctagaagatctacggctcccaggagtgaatgatgtagcttcaatgaacgaggagtcagctcatactaactatgtctgcttggtcaatggacctagccaaagcatgagattcgcctgtcgtcttcatattgaactgcgggtcagttgcgatagcatcctggagattcaagagggcgatgtgatcttttgcaaaaggttcgatgtatgagtaaatattctacctttatccaagcttcaaatttaattgcttattaaataccaattcccagtttatatacaaaattcagagtcagatatgcgtctcaaaagcggttattttcggcgtcaatcctataggctatgtgtaaaatttgaggcccaaggttcttattctagattgcttatagttttttattccaagatggaaaatacaggtacaatattgtagttaccgaggacggtgaaatgaagtacaacatagaaaaggactactccgtatactataccccccttgcatccctccccacccgagcggaggcatataataaccacaagtttccatttcacaccgctattttcctgaattgccactctatctattgagcgatttacaacctcatttcggttagtatactagtcggcggattatgcgttgtccttgacggtgtaggattaataatctgatccatttggtctaggctcatattatggatgcgatatacaatcctctagtcttttttaatttctttttaatcgctttcatcttagtatattgtataaagactcccgcacataatctaaaaagtgcccctataggcacgtgactgatctgcagcctcccgggatccccacttgacactcccgaggtcgccttcctcccgtccaataaaaccacttccgaggtccaccaccggttttccctccgttgtgtacatttcatcgcctcatacgtcatgccgaagagcagcagcacatcttcagtgaagcgtcgacttcgaatgctgatccatggccgtagagctcaagtgatttcaagacattatgggttccaaaatacaagaccaagagcagcagggaaggttctccccacgtatatgcaaaccaatctgctaccccaaacccaatcttcttcggccgccggcaagcatccaaacgccgctcctatcactgctcctcggctgcgtgcccgaggagccggtgagattaatcgcttggactagtttttcctggccgtctccgctcccttagaatgtctgcacactggcggtcaagatgcactcgccaacgatattatgcatcatataaaaatgctagtggcagagcattgcccagccggcttacaattcagggacctgagatagtcttgcaaatcaagcccagattcggttgcgcttttaaattgatcctgaaaaaaaataaatcacatatcccttggcttgtcctcgtaaatgaaatatcggttattgccgtacacaccctccacaatgaatatgtattcacccaatcgttttagtgtggaatcacgatttaggagcttcggggtcaccctcagccaccagctttccaacgaccaagtacttctccatgaagcggtcttcccaggactgcaggttctccagctgatccgcatccaaatccttcaaatcatccaacggcgccgacagatccgtggtcagcatttcctcatcgaagctctggaaagccaagccgcgcgacgcgtcccggccagcgaagttctcgtaaggtccgccctgttacatttcgtcagcttcagctccaacagcgccacccggtgttctttcgcgaatttcaaacacataccggtccatagaagttcctgccaggagtgacgtcgaagacgcgcccgcggacagacaagtaaacggggcggccttcctcgccgttgaactcaataagagttttgggaatgtaggtcttaaagacagttggcggcggcgcacgggggagagtgatgggcgccctgggacggaagtgccagtacaccaagactccgaagagcgagactaagactaggttgatgggcgtcgcgatagacatcctgttgggtagcggttagttgggttggtgacgggtgagatctggggggggggaacacgaacacttcaggctgtggcgcagaatgatctgcagttttagtttctagattagcgggtgttcagaacatgagcagcaaaggacatacccatcgaggcagatcttttgtatttagagaaagcacaccggaacctcgggatgacatcttctccccgctccacgtgattggaagcttacatattctctttcattctttggcttcatggatttggatttaggagtcgtctacttctctcacgtgcgggctagagactaggctctcggacttcagattgaaaatgtaaaacgccgacgagtccctgaatttgtttcaagactctccactgactatcgcccccaatttaatctgcccactcctattagcggatgtcatgttatttcaagtttcaagttatttttatcgtctagttcctccttccttgcattttgcctaggtgttcgagtcatttttatctatataatttgttcgcgcgttcttcctttattccataggcttccgtggccgtgcattgtcgccgagaaaacagagccccttctaatattctgcggtcctttgcctcttctttctccctttcatcctctctgttgtgactgaaatccattccatcattttgcgtgaactctgcgctatcatttccgaccaaaatcagccctgtgtcacgtctagagcgtgagaaaatccgctatgtggtctaagagaccgtttcacaagcccaaacggccttcgattagcggccccatattgaatggcaatccacctaccacatcagaccctgttcatgatatggtcgccaaaagattgcccgctctgcctgagtaagtcttgtgtttgctacgtgttcaatagatagctaatggaaatcagcgacttacattcattacaatcagatgtcctgcgtgaggatatcgaaaggacgccgggcgtgtcgcctgccatttcgccggtgcttgaagcgcacaggcgagcaagcgaaagtagtttctgtgtctcgcctattggcgacggcgaccaattttctgattatgcgcgacaggagactgggaccttgtcttccccaactcctattcccaaggcagactatgttgacacaccctctcactcccgggttcaacctgtccaacctgtccagtatctccaacatgattacgactctaggcgattcatctctggtaaatcaacgcactggaataatttttcagccgaaccgaccttgagtgatgttgttagagttggtgatacccgtcaaacctctctccaaaaagcctccggacctggggctcctgctcctgctcccgctcccacttccaacctactgaattggggccaggggttcaaccccaagaagaccctcaatgcagctcgaagccggatcaccagtttctcgaagaccgaagagctttcgcaaaaggcacccagaagtagatcggcgtcacgtgggcttccagtggaagagcgtaccagcaaacgcaacggcaacggtgcgctaaagacgagtccccagctcgataactttggctttgctcctacaactgtgaccactatcaccggcggtggtccagcatccgttccccggagaccggcaacagagcacgcccaaagccgcctaccagaggagcagaaaccaatattcaagttcgataacgatttcagcgacatgatgttcacgaccgaggaatccattagccgtttcagctcaaccacatacacagccaccgagccgggaagtcgagatccaagcccgcgagtgagtatgcagcttgaaaaccgatctatggacgatgtttccacgtcctctatcatgtcccgacgccgcccaattccaatcagcgtgccgacttcgaagaagcccgtccgaaaacccactccatccgaggccgcacagcaaatcgcggatatgtccgctcaggcatcttcgcctccacccgaggtgcctctcgatgcgcatggccgcattaaggcaatggaggacaagagggatgacctgaatcagcgcagattgaatttgcaggcgttaatcctcgagttgagaaaggttgttcatcctacttcagctgtgtatgacctggctgctagaaccgaggcccagaagagcatcaaaggcattgaagacaagcttgcagatatcaagaaagaagagcacgatcttggcctgaagattactcgagcgtggcgtcgcctagacgagaaggagaatgccggcgatggcaataatctctgggtcaagcgagtcactagttagtggctgttgagttgtgaattggtccatgcgcgattgatcttgatttcatttctgcgattgtggagttgttagcgtcctgtttgattctactttttcaaggcaatgtgcttgttctttttccgatattgcgacatggtggttgtgttttgagcgttcgattccctgcattggcagcctacatggcaggatgatacccacttcggaagcccaagctgtggcggttaatgttgatgtattctagtctgattaatctcattgcttttttaaaaacaggaaactcgtatgtgaaaagcgatcaagcgcgaaataggtattggtggctaaagatatacagaagacccatagaaaataactatgggtgcagtgatgctgacgcgatcacacagccacccatcctccgctcgctcattgtacatggctcgtgtaggtcgtgaatatggactcaagaaacctggtgtcaaggctcgttgggggattgttggcaagcgatttatcgaggagtattcgatccgtttatttcttgccggacttcttgatgccttgctggccggtgttgagaggacccttcttgcccttggccgcttcctgcatgtccttgcgggccttggcatctagtggaaattagtaactgacttcgtgaagagtgtgtcaaaagccataccagccctgagcttggcctggtgagcgagctcatcctcatccagctccttcttctccttcttggctgccttcaagggcttagccttgccacctgtagatcataaggtattagtgaacaggattccaaggactagaatgcgaggtaatacgaaccttctctgccgataccacccattttgtccgaataaaataactgggagagcgggttggaaagagtcttgatagcgcggggtgtttagacggcgttggcgaagaaaaatttacatgaggggtgcttatccataccttctatggctggggcgaggaccgggctatttttgtgaatgttactagcggtataaaatgtggtattatttcaagaaaatacacaaatgttgtgctgcaatcacactgattacataaatttagcattggtgataccctaaggctagactgtatatggttagtgccatatccaaaagttatattccccgcggagatacaccacagggtagacggcaaaaacttcaatccaccgcctacttcaaccagactagcgtcgattctgccttatcgaccattgagcaactcgccatggcttttcaatcgttctcttgctgtcatcgacatcctgcacgtgcttttatctacttctcaagcctgttcttcagaaagctatgcgcctgggattttaatcacttttgcaaggctttggtgtgaaggcaggcctcttacagccggttggatttcacaaaccctttgagaagacttattgtcgctggcgcttttgctaactaagctttgttgttgaagcttcactccaaaagctgagtgaagtgaacccaagagaaaagtactgtacatacgtgtcgtttgaatccctcgaacgtaaacatgtcccttcccaggtcgaggtccccatcggtcccctctgagggtgagatcgtcgaatcaggcccagagacgaaggcaactgcgtcacaacctcctcttaatggcaccagcgttgaccgtcccaccagagctagcccatcctctgcgcccggatctcccgcctcgttgaaagacactcgatcgccaccccggcagaggtcgcggaccaggtcccactcgagatcccgctctcgctccccgtacagagagaataagaccaagcgcagtctcgacgaccccgagtcctatgatggatcctacgaccggcgaccccgcaatgagcctccgcggcgctacaggtctaggtatgacgacagacggcgtgacagacctggtccgaacaggcgcccgaactcatactacgactatgaccgcgaagagacgtacggagaagcgctacgatacagtgatgattacgaccggaatgaccgacacaaggacaagcggcagcgcacccgcagccgctctcgatccccttaccgggaatcgagaaaacccaagcagtattcaggcgacgaacttgatacaaatgttaatgccaggtcttcagcggataatggaaggcgcttgcccactgaacagttggtgagggaacgcggaaaggcttcggttggagcttcggacttgaagcttggtgctgaaaaagaaaagaaccaggtgcaggcttcttctaatctgaaagctcatgtggctgacgagtatgtttattttgttgctggcgaaaaagaacgtgttgctaatatccatcccagagaaacccctaacccagagcttgcgcaagagccggagctggctgagcccattgacgaagctgctgcacttgaagctcgtcggaaacgccgtgaagctattcgggcgaaacaccgaagccaagcgacgcctctacatctcaaagcactgaacgtcgaggttgaaacggattcatctacgcctggcactgagccaactagcgcaaaggaagcatctggtatgtttctctcggacaagcttaccctggtatcgaaactgacgcctggaaactcaatagattctccgcgagcatcccccttcgaacaacccggggaggcatttcctggcttcgttggaaaagatatggatgtggtcaaggccaatgcgcctgttggcactgacaaggatgagtcctctgctgctgattatgatccaacccttgatacaaaggaagaaagacaaaaacatggcaatgttcaggatggaaaggacgacatttcgtctgcagcatacgatgaaactaagactggcaagcaagatatcctcctccctgatgctcccccagtgccaccgccgatgaccaaggccttcgatatgtttgcagatgacgacgatgacatgttcgcagaggaagaacctgatgccaagccggcgcatgcttcggccacagctgtaccccagggcagggaactagacgtcagcatgatggataactgggatgattcggagggctattacgccgttcgactgggagagctgatcaacggaagataccatgtccatcagaatcttggcaagggaatgttctcgtccgtcgtacgtgcaactgacacgcagacagggggtctggttgccgtcaagatcattcgccagaacgccatcatgcgcaaggccggtatgaaggaaattggcatcctcgagcaactccaggaagccgacccgctaaaccaaatgcacctcatcaagttcgaccgatatttcgatcacaagggccacttgtgtatggtgtttgagaaccttagcatggacctgcgtgaggtcctgaaaaggttcggtagggacattggcttgaacatacgcgcggtacgggcctacggccagcagattttccttgggctgtgtcaccttcggcggtgtaacatcctgcatgcagatctcaagccagataatctccttgtgaacgagcaacgcaacattctgaaagtttgtgatctaggttcggcgtcgccggcctctgacaatgagattacgccttacctcgtcagtcgtttctaccgtgccccggagatcatcctgggtatcccttacgactacgccatcgatgtctggtccattggctgtaccctctttgagctgtacacgggcaagatcctcttcacggggcgaaacaacaaccagatgcttcggtccatcatggagtgccggggcaagtacccgccgaagctgcttcgccgcggaaccttgtcgcctcaccactttgatgaaatgctcaacttccacagcgtggaggaagacaagatcaccggccgcctgcacaccaagattgtggactttaagaaaccgacgcgggacttgaagacgcgcctcatggcacagggaacccgcgggatgccagattccgaggttaaagaactgagcttgttcttggacctcctcgaccggtgcttgagtctcaaccctgagaaacggatcacgcctgccgaggcattgaagcacccgttcctggcccctagggtgtgaacaaggatttgcattgattcgttgaccagggtccaaccctggtcctgggacggcgcagctcggaaggatcggcgttatcggggaggttgatctatgaggggattctttgtccatatggaacagtaactaggttcaaatcaagtccatatgtaacattttcacaaagcaacccctgtccatcctcggaccatgttgtaggactcctgccaaaccgggagtggcttaggatttatccaacctttcattagagcataaacctagcgcagtatcgaacaaagaaacccaaccagctcctaccaaaaacaacctagctctactccgtacctaggccccagcacatcggtagcgcgcgataatccattcatcactatcactatcactatcaccaacaaagaaccacccaacaaacacaaggcccccgtcgcggcgccccccttcccttcggccctagccccctatcgacccaagcccctggaactatagatctgtacaaaccaggtaaccaactaatcaaactcaactccactccacgctacctatcgtataattgcaagcacatcgtatgatgccaaacaaagaaccccaaaccttcaagcccagatccaatccaatcccaacacggcaacacaccaaactcacgaaccctcggacctcccctccccgcgagaccactaaaaacagaaaacccacgtagccaacgcccacgtaagaaccgtaagaagttctagatcgcctctaagccaaactcagtcttaggccagtctgcacccgtggcttcgtgggtatctagccgaaaccttgggcgttttccggttctgagtttctgattgtggggaggtatgaccttggattcgggatagtctatcttggttgaaccatgggaggaactattaactaggagattgaagataatagtccgtagatagataatggataatagataggtgggtgcgggattatctgattggcacggtgcgcaatgcatgtcgaatggagtacaggacactagagtgcactattgcctcctttcacgggtctgttctcttaggggcggcaaaaggcggggttcttttgcaaattgcgctcgtgtttcccggccgttggtggccattgggtggaagacgtgtcgtcgaggtaattgttggcaaatgggaggatgggagatggcaggatggtgaggattggctttgggcttgggcttagatttggatggatgccgatggctgccgatggagtgttttttgtttttttttctgcgtttgtgttattatttgcttttggtctggctagttactgttacttggggataattgtttctgtatgttgtatgttgtatattgtagttatattgtacggtcggaaaaagcaatgcgaaatggatatctgttctgtgatttacttgcatgtgtttaatggtctacgtactcgatccctagtatacaatgtacatcatacctgtagtcatcatctcaatatccaatatccatttcaactatgtttgcacggtcatacaattccgttgtagtccatgggctgcttcaagtggagtgttccagaaggcgacggcgatcaacggaagaaaggagccccttgccaccatctgaaatccaggacaaatgcaaatccaaatgccacgagcgaaaccgcccgtggcaaaagactccgcccaaataggacgggcgtttaatctccggccccctttcgtcaggttattggtctattggctgtgatcgggactagacatggatgttcgcgccatgttttcttagccccgagtaatcatgatgtcgagatgtgtttatattgtgggtcccgccacctgcagggcgagggcatctacacattggggagttgggcgttaagaggcaattgaagggtagctgtagttattactccgtaaaggagggcaatgtgcttattgggtgggagatgggatcggcggttgcagctgagtatcatgcttgcgttggagttagtagttggtttccaataagttggcagatagttacattgtatgtacactattctctcacagtcgtacagtaaccgtctatgctgtctccgtagttaatcatagcggtgtagaccgaaaccagaagccgaaaccaacgctacaacacctcacacgcccgaacacaacatctgccggtcgcagaaccaaaaaaagcaacaacgtcgcaaaaagcaacggcccggttccgagcgaaaacgagagcattgcttgctctttggacgagccagctgcattgctaatcctggggtacataactaccggtaatacattagtctatggtcggaggccaggcacgggacaccaaaagggacgggcgtcttatcacaatcacatatggcacatatcatatcacacgagtcggcagcttctacatcttgtcagacagcggacatggtacaggtacatgagactctctgcatgggcaggtttcgggtgagaaccgataacggatgtgatgaatcgcaaccccgggctttctatcaggtgattggactggatgcgggcaggcgtcgatctagggagctttgggtagagggttggttgctcaccgcaatgtagagtacctagacaacataacagacacatctcaactataacatataccatatacaatatccaacacgcatataatatacagtttgaatccatcactcggatcaatccttggcccttgcctggtatatgacgcaagtgagatccaaacaaagaagtgagattgaagactcgacgaggcaactttatgtttgcaggggctattcttaccggggctgtgcggagtactggaactatggagtacatctccgtgcttacgagagaaaggtagcccagccacccagaacatagaacggaaccagaacagaaccagaaccagaaccaacagaacgaggtcgacctcaagaatagcaccaataataatacgagcttcctccaagccgtccgagaaggtcaaggtacattagcgccaggagaagcagatgaagtgtatggcccgtgcagaactagtcagcagggaagcgccaacctccactggccctccactggccctccactggctttagggggtttctcgaaaatcgaacggttcgggcaaatggttggccatagcgcccctccatcatcgcctcactctcggacttgtttagcgtgtctagaccaagtacggagtagtactcggtggggtgtgggatagagttgggtgtctgtgcaaagacggtgtagaagatacctggtctcttcataaccaacagagaacataattagttcagacagatgcatcaatcattccgatccatggtagcaaaggaggagtagcttggaccaagatctcaatgccatagctttgcggggctggggcctgattggcagaatgtgagtggcgggtgtgttggcagtgtgtcgcagtgtgtcgcagtgtgtcaggaggtttcaaggcagaaacaccgttggggggaacaggggttgggatacgtggataaagctttgccacactaggcccagaacggaacaaccttgtgcagcgtggaaactggattggggggaaataggagacactctgcagcgtccaggtcgatcgttatgatcccatggcccaatcatcggttgtggcggctgcaggaaagaccggccgaggtctaatgattggtccgaccacactcgggcatgcacaccgcttcgtacacatggcctattattattttgggggaataatctggtttagtgccactccaggtgccactccaaggtgtgtatttttgtacgcatcatagatttaattattttgattttgattttggttttattgtgattttatttaattccttttcattcgatcctttcctctttcggtttttaatataatttccttttcgactagcgcccttttcccgtttgttttattattgttcttctcgaaccacgaggcggccatctgcctgatacatctctataataatcctccttctctctcgacttcgcgaccttgtatatttcacatccctttcttctacctcgactccctcgccttctctctttgttttgttttcatccttgtatttgttcttacttcctggtcccttgtgcaactctctccttctctcgacgtctatcaaacacaaccagaccggaccaaacggacctagatcggaccatcttaaaaacaccccattggattggaatggatgccttttgaatatccgtggatttagtctcttaatctccctggatcagactctttgcgctctctctcttatctcactctttcctcgtctcatccgggagaggaccattggatcccctctacaccaaggacatgtacccggcaatgctacccacaccaccaccctcgccggtgccccgacgctatgcgcccgaagatcgcctaggactcgtattagccaaccggctggaactcaccagagtcctgggcgtcggagcctatggcgtcgtttacaccgccgtggacattcacaccaacgaggtctatgccgtcaaggttctctgcaaggatggtctggatgcccgccaactcaagttccagcagcgcgagatcagactccaccacctggccagccaacaccgcaatgtggttcccttggttcgcatcatggattccgtggattgtacctacgtcgttatggaatattgcccagaaggagacctgttctcaaacatcaccgataagggaaactttgtcggcaatgactttttggccaagagtgtgttcctccagatcctggacgctgtacaattttgccatacgctgggaatctaccaccgggacctcaagccggagaatgtcctggtgaccgaaaatggaatgaccgtcaagcttgccgactttggcctggccacgactgattattatacgaccgactttggatgtggttccaccttctacatgtcacctggtatgcctcaaccaccctctttactatggccgtcgctaactttacatgtcagaatgccaacaagccaacgctcgacccttgtcctgctacatgtccgctgccaacgacgtctggagtctgggcgtgattctggtcaatctaacctgcggtcgcaatccatggaaacgtgcctcgattgaggattccacattccaggcctacctcaaggaccccttcttcctgaaaactattttgcctctctcctccgagatggttagtattctcagccgtgtctttgagattgacccaatgaagcggatctccatcccagagctgcgccagctcattctggagtgcccccgtttcacggagaatcccatggtcccaaccccctgggtgccggagcagatcgactacattccccagccccagatgccattgttcatggcccccatggaacccctgtatgcccagacctcaggctcgtccttggactccgcgcaatactcggccttctcccagtctgctgcttccgtcggttcggccatcaccgaggattactcggatttcgataccatgtcgcctgcagtctcgcagcagatccccgattacaagggcttcccttctgtctgcgcggaacccttctttcccgcggatcccttttcttacggcctcatgcaccctaacctccagggcctcgagatctccgtctaattgctccttgcctcgcagctgcatgacttcacgctcttctctacgtttcctctatcgaatgctctgcgggtacctcctttcgcatatctccgggcccttgctcttctctctcctccctccgccaccgagcggattcaaaaagctaccgaacaaaaagttgatcgcgttgatcatgatccactggactcggctaccagctttcttttcccttggacatatttctttactatctttcccttggaccacggctttaccctggcttaacgaccgcgaccttgcatggaccgtttgaccacagtcctgtgtcccttgcgaccgggtctcctttcttactgttttaatattcccaaatacctggaggttctttttacgttcccattttctggcgtgataatacactgggaagcatgatttgaagacacgcccctgggagggctgatgaaatacgggctcttgtttattcttttcggattggtgtatttggtcattttcacacggcgttgacgcttgttcgatttttattctctgttcatcttttggggacggctttttgttattttgacgacctaagggtgtgatctcgttctactcatgtgcatagacttttttttcgcattggcgggacatttcgggacttgttcccttttgattgattcttacgatatgatacctcggtgtggcaagagaggaatacttacttgataatctacaccactgcatctgcatttctattacagcaaattttttacaattcccgaatctcacctgcgctgcattccttgtaacgtttaacgtcttcccaacctcttttctagtacgctgttgtgcgacgttgcgccgtatgacaacggccgagactcgattcggcctgggatgatgctttgtgtttcgttgtgtgatggcttgcgccactgtgatatcgctggctgcctgagtggcacgcaggccgggacagatccattccgggttgacggtatgggtttggatggggttttacagtactaaccctgtacagctcgtggttgatctcatatacaacatgcagcagggtgacatatacatacacctcacaatctcaacacgatatatatatctatatacacatacacatttaatgaagcagatatatactattcaagatccagcccgcaacctggatatatatacatacaaaatctacatattccttccacctgtaacccgaatcgtctcaccattaacataagaaaacaaaggcgacgcaacacccagaaccgccctcgccgcctcaacagggctcgccggcctacccaggggaatatcagggtacgcaggcgcaatctgcttcttctcctgaccctgactctggtccgcagaggaaccctttttagttgcaagctgcttacccgggattccaagggcaaccttcgtgccgtcaggcgtggtgatgaacgcgccttcttccttggcggccgtcagtcgtgtagttacgaagccgaaggcgatggtgtttgaccgcacgccgaaggatgggccccattctttggcgattgtgcgggttagcccgacgacgccggctttggcgacggcgtaatttgcttggcctctatttaggattttaggatttggtatttagtaatgtagtaagtgcttgttgttgggcgaggaagagaagagtggggattggaattgggggctgggagttcggggtcgggtacttacgcattaccgtggatgccgctggtgctgctgatgttgatcactacgcgcggctcttggtctttgacccggaagtagggtgctgcggcgcgcacgagctggaagggcgccgtgttgtggacggctagcatggtttcccattgcttgtctgtcatctgtaattcgttagtgggatgctataactaacattgtagctggtaagtagtatatgtcccaccttgtgaataacaccatcccacgtgaacccggcgttgttcacaataatatggatcttgccattgccgaattcggcagctttcttgaccagttcggtgatgtagttgctgtcgaggacgtcgccgacgacggcgagagcgcggccggcctttgcggagttgatcgcgtcagcgacggcgttggctttttctatttgtttgttagatatgtacaaatttcagtgtgtaatggatctcactggcgtcgatatcagcgactacgaccttggcgccttcgtttgcgaagagtcgtgctgtttccgcgccgatgccttggcctgcgccggtgatgatggctacttggcctgccaggagaccggccgggtagttcaggtgctcgttaacttggttgagacggtcgaagggagccattttgggaactattgagtaaattgaaggtgggcattgggcttgtaagaggggaaggtcttatacaacctctcggctctgggatcgccgaggctcaccgggaccgagattgtggggtatacattgagagatggggtatgactatttattttgatattgcagttagttggttactttgcttactattctatcgtatataggcgaagtttttcgattttcttaaatagccgatctgcgtttgctgtccagcttgtgaatccaactctaccccccctagcgtatagaacaacaaaaacagttgacctcccatatgtgggtataattcagagagactcatcatgcatcactcgcccagatccacagatacactctccccatgaagtcgactgtaagaatgccgacaccgtagcttcgtagcctgcaataatggaaagcagcccttcacttctgggtgtgctcggaatatcaatatccaagtcgggaaataagccgatatgctccgcaggagaccagtgaccgatgtgctcatctaatagctttgattccgatgaactttcatggtccaacttggagatcagaacgtcggcagcattagcagtgcttttcagggccagcaatacatcccggcactgcaacaacagaccccggagcaggaagttgcgtatctgtctgttttcctcgtggcagatctcatagtatccgtagcgaatatcgacgccatgttctggccgcggtgcgcgagacgtctcccgcgaaacccagtactcaaagagctggagcgtgagattgagcactgaaatactgagcagcaggttcgtgctgtctttcgcgcatttagtacactgcaggaacatctgacaggcgcagaatgtgcatttgattgtctgcagactgtggtccagccgcaggggcatggatccagcgagtaggtggttcagccggtccatgtggaatagctgcatgtccacacactcgcatggcgagatcggatacggcgaagccacggagccggctagagacggactggccatgctgtcagccaggtccccggacagaaatgtcggcgtcacgggcgtatgtggatatcccaggccggctgggagagcaggacatggatccacaagatctgtgaatggagagctctccactgtcgtcaactgtccgggacagatggatgactctagagttgctgtgttgccgaagcttcggggactttcccagaagcctggctggtttgatatcaaacagacctacacgacggcacttattaaaaacatgccgaattggtcagaggaaaacttacgtcgttgtcgattgctgggtcgggaatatgactgccatagctattcccgactggcggttccatgtcggccataggggcaacgagccgactacctcgaaagctgcgcatcgcggacttctcttcttgcaactggcctagcttgcggagggtggctctgttcttgctaccctttggtttaccggatcgatttgcaaatccatattggcactgtaggccgtgacgcaggcaccgagtacagacactcttgccagacaggttgcatttcaccttggattgcctgcagttttcacacgcggttcggagcttaggtgtatctccgccggcatatgggctgccattggactctgcaagcattgtctgtttggtgctggtggacggggagttggtgtgaaacaggctatcccaatacgatataatgacactacctatagcccggggttcggtgatatatggatatagatggaaagaagggtaacagaggaaagaaaaaaggaaattagagatagaaatctaggatcaacgcgatgataccgcacacgtccaatgaggtagacgcttcacaccctctctacacccacttcttgtatatatataaacaagctcaagcttcagagaagtaatgtcactctggaattcaatccagtaccgacggcagccgcatacagaggtcagccgctgtgaaaccccagatgcttccatctgatcaaccacgcatgggacgccaagtggcaccgttatcccgaggttaaaaggagcatcttccctcattattctcgaatctgattcaacctgatctggcaaaagggaagttcttttgattcacagcgttcgctattttagaacattgcccatgatatgggaaaacagggtcccccaggagaaaccggctagggtccttttgttggccgtcacaccctgatgcaacatcgtaaacgccaatttcggggtcaagtttcttattggagaaccgaatgaaccttttactaacaagggctattggtgtcttgtcgctctggggcctgctctctggaacacaagtacaatagcctcgaatggacaacgctgggcaccatgtgaaatagaagtaaaaaaacatctctttctaatcggctgaccgggtctagtccctgtaagtaaattatgcgctcatcacttcattcctttcttcgtcattgtgtcattgttgcacatactaattcgagtcaccgtcagcagggggaccctttgacactcgagataatttgttgtaagccgcgccacgtacgctacaacgtgaacattccatttcatgctaccttttaaaaacgccatgagcatgttgtccaacctcgaacttgtgttgctccagaccctgactcagccgcgtggaatctgacaggtttcggcagccccgctgtgccgataatcgaatgccttcaacaaccctgtcagatgagctactgctgcgcagaccaccagcacgtggaatatttggtgcgaactccccacaatgtcgaatttcccgggcataagtcgctcaggtacgcgggccgcataaatcgcggctccaaggatatacaagaagccctgaaaaacgacccagttcagaccgacttgccgctgcatgcggtcaattccaaagagaagaaccccatggatcatggggaagacagcagacaagcccatcccaacaaacatggtagcgcggaacggacgccagcgtggggtgcggaaccggggagacgcggatacaatcacgcagcctagcccaatgatactgatcatggcccagtacttgtgctggagatcgggtgtacagtaaaatccgtagaagatactaggcacaaagcttcccacgatgagtcccacgataccgatatagtcgagtgcatttccaatgcgtgcaaccacaggtgaatggtttgagatggtgtgataggttgcggacatgccaagacagaaggcagcccccgcaaagaaacaggaaaaagcgaggatatcagaatcggccgcatcctggtaacgcggagaaagcaactggtagagctggtatgcagcgggggcagccatcagtgctggcaagaggtgggtgtagatattgaccgtctcattgtgaacgtaacccagcgattggaatgaacctaaaaatgaggacgaggcgggccgatatccagaatggatgtgatggttgtcgcgttgccagtgaggtagatcatcccaacgaagaagtcgttttaccaattcgtgagcctcctcgccgacagccgtcatcctcgtagtctgactatctaccgtcactttctgagattcaattgggcgacgttgatgaggcataatcacatgtgatatgcaagtatgcaatgagttacaggaatgttttgaagttgcccaacaaaagaatatgtaagacaagtcagcaaatgaaatccatacaaaaatcaaatcaaggaaaaagcagaaataaatatagacaagataaaaaagaacgagaaatttccaggcgttgggcagttgagggaaatcgtcctgttggggaaaagcctcggaaacaaacaagacaaacaccatgtcaactccacacttgattcatacactatgtcaacacatgtcaacacatggacatggcaaaatgagtcgcttacgcccagtatctgactctctggaaaatgtcggatttgtttcaaagggggacaagaagtgtgtttgacatgcgcactctcccgggtcaagcatgctaacattcgcagactgttggaccataagatccagacgcagtacttcgataatatagtcgatcgatacatgcggttctgtgcccatcactcgaaagacctcgatgcagccttggcctctcttccaacaagtccctccaacgatgcgacttccaatccgcccgcttcccggtcgcccttgaaatcaaaccccgcacagaagcaagtctcgccagcaacagagctatccacactccttctctccctccggaagctgcgcgaagccgttctggcaacagccacaactacaccggcagaattctcacagcgagttcacgtcttctccattcgcttgtctattctcgcgcatcacccaccgtcatacttcccctctctccgatacgttctggataaactgcactccccatctcacccactacccggcgctgaagccaacgaactggttacatacttgattcttgattatgcctgtcggcaaggagatatgattgcggcatacgaactgcgtgctcgggcgcggaaagagcattcctatcagtcgcagacagtggataaggtcttggctgccttgatccacgataattgggtggttttctggcagttacacaacagtgtggattctcatatccgcgcagtgatgaattgggctgcagaccgagttcgcaggcatgcgctcaaggccgtgggcagtgcttatctcagcgtgcatattagctggattttgggcggctgcaccggagacgaacagagttggacatgggagaaattggtcgagaaagagaagctccgctgggagcgggaaggtgataggatcatcattaaacgaccgaagcagaaaacccctcctaagccggagccaagtgcgtcgagtgcataagtcatgggtacatgagtacatgagtacatgtcggactggactttctctggacaagagcatttagtggcgttcttttcattgcatggcgttggttgggaaaacgtcacttcattaccagacggacatcattcacagagtataaattattattagatcgtgcgcagaaaggaattcaatggcccacagggcgaagtgattttcaaattaaagcgttataacttcagatctgagttcggccgatctagatttgtctgcccgatgacaggttgttttgatatcgtatcagctagccgtcccttcatgcgagttgcactgtcgctacaaagctcgtagaccgtcgacaaattgaatatcaaactaccaaacgaatggttggatgtgacctgggcctcgaggagccgacgagactaagaacaatcagtcaacaggttcaaatcaccatttaaacggctaggggtcaaatacctcatccagttgtccagtgtacagaagacacacagccagattttgagctaccagagccccgtccgtccttgtcctatcctccccgagaatacgccactcggccactgcatcggcaaagcgaccatccgacatgcttatcaaaggctttaataaaccagcctctttcgcttcattggcgtcaccaaatacctgacttgctgcgtccagatcaccaatccgcaaaagcaaaagtgccttcctcaactttgtgatgttcgactccggcccaggtacccggaggttatcaagtgatctcctggctgcatcgaaatcacgcatctctatgagtgcattcacgctcctaatcccaagatctgccaatcgctgtttccataattctcgctcagcttcagtagcttcgcttctcatgatctctcggcgcgcttcgaggccgatctcgtacaaaccaccaatgcttcggcgaggatcaccaaatcctatactctggagtctcacggccagtacgcgaagcggccatggaacaatatgacgaggatcttgttcatattcttcgtcattttctgggttataatcagcatcgactggagccgattcaagcttgagatcgatataatagaatgctgaactcaaatcttccagggccttcgattcctgtgctgcgagaactgtattgcccgacagatccaaacaggctagccgcgtgtagaaaagggagaagatgatctttatatccgtcggagatactaaagacgaagtcaaaatcgatgcagagaaatgcgccgcaatgaggaatcgaccctcggccaatagcttttctagggtgcctagagtagtcgacaaaggttcccctgggttgaggattaggaattcggatcgcagtggcagagggatttcaagatgagagagggtatggaagttgctatgccggagtagaaacgagaggtctttttctaaaggttcaggtagatcgtctggcgcaagcgggtctaactcatagaaggatgccccagaaaaggcgttgtcggcagcaagcattgatttgtgtttgacaggcgaggtgggtgtttcggggagagcgagaggactggatcgtgtaagaaaaaggatatagcggtggaaggcgatgtactaactcatccgatgcatctaaaggacctcttgtcgagctgcggggccgagaagctgcataggcaatcagtaagggacagtcggttaggtggtaatgaagtgagcgcttacacttggagatattccgaatgtgcttgcctggtactgaatccatctctacaacctttgaagtatttttgagatcaattagactgaaaagcagagcatgtatgctaatccattgaagtcgaagcaaaacacccgataagctatcggattctgccaggcggtggatgccggatctggcgacttggccgcgatctggcgttgccgaatgcaacaagctgtcagccatacgttccctatcttttcttttctcttttttttatatgatctttgctcggatcttttaccctccttactttattaattgacttgtgggttttcaacaatggcgaccgagaacaagtactcggtcattcttcccacctacaatgagcggaggaacctccctattatcatctggttgatccagaagaccttcaatgaggagtatgcgctcgctctgatatgacccaagagcactggggttaacttgtggttttttaattataggaagctggattgggaggtgattatcgtcgacgatggatcccctgacggcaccctcgagatcgcgaagcagctccagacactctatgggcccgaacacatcatcctcaagccccgtgagggaaagctcggtctgggtacagcttacgtccacggcttgaaatataccaccggcaactttgttatcatcatggacgctgacttcagccaccaccccaagttcatccctgagatgatccgaattcaaaaagagaccgacgccgacattgtgaccggaaccagatatgccaaccggggagatatcaagggtggtgtctacggctgggacttgttccgcaagttcacttcgcgcactgccaacctcatcgcggacgtcatgttgatgcccggtgtgagtgacttgactggaagcttccggctatacaaaaagccagtgctggagaaggttatcctcaaaaccgagagcaagggctacagcttccagatggagatgatggtccgtgctaaggcaatgggctacaaggtgtccgagtgtccgattaccttcgtcgaccgcctgtacggcgagagtaagctgggtggatccgagattgtcgagtacctcaaaggtgtaatgagcttgtgggtgaaggtctaaacgggccataccattggaactttggtgccccaatgcttcgattcatcttcgtctcaaatccaacatggtatcatgcctggacttgcctactgcccgtgctgtgatatacccctttctgacctctgttattctcaacccgtgcacttttgggtggtgtttgaatgacctgtttactgtcggtatcaattcaacgttctcttgccttctggatttcacatttatatgcttcaatatcatcaaccttcagcgctcagagggccttgaggtatcgtagaactcgatcaatgagatcctgctgaccttcggcatgaacattgtggctggcttcaggaacgatcccgctgtttgtatcccatttggcgcctcccgcttcgatggcttgctgccatctccgcaatagcttttccttgtccacccaatgcgggcaatattcatcttctccagaatacaaaaccaatagctttgacgtgataatgccctgcgtacccaccatgccaaaggtctcctgcaaacgcttatcactcaaatccgagctgaagagatcgtcatcagatgggtcgtcggggctatgaggactgactagactcaagaatctccgggcactaagaggcgtgtcggccggataagaaagcttcgcagtcaggttcattgggaggattgagtcgttcttatctgatgtgtatggatgctccttggccgagcgcacaagctgatcgtagacttttctgagctcgtcgggctctggagaagcatcgataatagcttgcagaccctctctatcagaggcaggcgcttgtagaatagcaccatccagcgcagggcggaccaagtgctgaatgccaaaaccaaactccttccgcggcaagggattcggcgaataaaggtagtggagtacgtcctggcttccagtcgaatgccccatgatcgcaatctttccggctgttgtcactgcaccgggttggcgcgacgccttgagatcgcgaacaaaccgcacacattgcccaatttcttctacatcgcgatcaaggcttccgactccccatccggcataggaggacgaaagtagggtagagaagaccgaccagtcggtgtcctctagagcgttagctagcttggacacatagggaacagtggaaaatccatctgtcagtccgcctatgaagataaggctgtttgtcatattgatcccccctgttggtggggtgaactcgaatgccacaagtctgggagcctgcaaatgttagcttgtcatggagaagaatggggcgattattagttacatattcatgtaggaaaccactatgcgatggcccgcgactagcatttgaggacatgatggaagtgtggttggtgataaggttacacttcgtcaagcccgaaggtgtggagggagccagttgacgttatccgattcgtaggccccggggcggctgggcgggccatatttgccctaccttattggtcttctatgatctcatgagcttaaaattcaggtttatgccaatgactttgcgacatacagtttataatgtcaccgagaggacgatctgtctaccaattgtaactaacatttactcctcaactcaaactgaagaatcgaaatcctattctaattttggtcttgaccctgagaagctattcaagattgttccaagcctgttaagccacccttctatgctcggacgactgatagtcctttcccaattccccattgaccgacctgatacttttcaccaacagtagaaaacccgtaaggatcaacggggttcgtataaggctctgataatgtcgtatagtatctgccaatcatggggtcgacacgagcctctcagacgatattccgtttatcaaatagagcagccgaagtcgcttagtttggaaggcttcctgatccgcgatgagaagatagacttcggcaatgaccttgtgcagactactcgcatgattctcaataatcttatcccggctttctatttgttttcaatcaacagggaaatcctacttcgcgctagagatattctccttcaactccttgcagaacaactcaaactatcgggagaggtgtaccgtttctcacttaatgccactgggccagctatctcgtgtaggacctcgcatataagctgctagtcatcgccgaaattgaagagattattgtcgttgaggcatgcccagtctgaggcatctttgaatatctcttcatttttctatgccttcagtgtctcgtcgtcttctaggtcggcactgtagtagaaggacaggcatgctatcggcatgatgaatccactgaactttccgacgaaggtcattgggcctccaatgaggaagaaatttctcgatttctctgttgagagttgagaagtgttagcgagttccaagttgatgatttgcagacataatggaacgtgcgatcaaaaacgttcaacagctagcccggtccttggagagatatttgctgcataatgaaaaaaagggttgggaggaaacaagaagaaaaaagcgaaggtcggagggttatatcgaagggtttagtttaggtacagtgagcggttaaggggtggatgtccaaatttatgggtgaaaagacagccgttcctggcctcaaaagcgatcattttaggtgtcaattctgcaagtggtcattttctagttctacaatgaggtatgtcgtactccgtatgtagcccacgattcgatgggtttaatcggttggtgcctagaatccaaggcaacagaactagccatcttgggactagcgtcaataccttgaccttcgtattgctgaagcttctctatttcctaaatcaaatagcggacgtctcaatacacaatattgcagctgcattgctcagtaaaacgtatattactgagctttggacaatttgacacgctttacgcatgcacatcactggtgtcattggctgtcgtcaacgacgcgacctatctaagcaagatgccttccggccgcaggtctggccgcctcaagggacccagggctctatacgttgatgatccatttaaggcagctgggatcagtgatgatgaggactccgctgagcaggaaattcctggcaaggggaaaaagaagcgcgccccgacagaagattcagcctcagataatgaatttgtcgctgggtcaggcgatgaagccgacgagggaatcgaggaagaagatgagcctgaagagggactagaagaggaattcggatcagaagccgatgcctccgaccccgaagaaatggagctcgacggcatcgaggatactcctcataaagagcgttcgatgtcgtaccaacaagatgcgagtgttaggaagcgaagagccgatggaacagttgtaccatccgccgaagagacacacactcgtggcatcatcgaaccccgagatcacttgtccaaaggcacctattacactctcacattcggttctgacgatcgagatttgatgccagccgtccacttccgaatgcgatggaacaagggtgtagatgcggtttttccatctcgctacacattagaggagacggagaagaagcctgaatatctatacgggcccacgtttggggttcacccagatgatgttctgaaagaaagcacccgcgggtgggactggtattatgatggggacattggtgagaggttccggaaaagacagcgcattgagacgattgaagagtcaatggcgttccaaaattacctacccaaaccagatgcgcgaaaacatggcattttactaggaccccatgataatcaacaactcttcgagctgggctatcatgagtcttttgactttggaaaagcctgggaaagtccaaactccaaaaaagactcatcaggagctgagatcaaaaggattcgagaaggttggatattaaacatcggccacaaggcacattgcatggcttgggctccaaaccaggatggtctgactcagtatcttgctgtggcggcgccgattacagaagatcagaaaagccagtacaaatccgaagatagtgagcctctctcatcgtttcaaccctcggagcctttccctagcgccttacagatttgggagtttaagggcaaaccgagtgaaactcttacgatggctctcgatatggactccaaaccccgccttcggcaagttttgtgtgctgactggggggacctgagacgcatggtatggtgtactttgccccggaccgaacgggtggaggacaaagaagaggaaaaagaatccattggtttacttgcaacagtttggggggatggatatgtgagagttttggatattaaaacaggtagagggtcacaagaaacagaatttcgtgagtgtccctttggagagatttcacgagtcccgctaatgtgcaagatacagtcaaaatcaaatcccctgcgtttgaggcaagaccgccatcaacagtctgcacatgtgtcacttggctatcccctagtgatattgcagtgggctgcggtaacggctttgtggctctctggaacatcgaaccttcctccatgtctgaacctctaccttttttctatcggccactccacgccacctacatactcagtatcacatcggcatacccggtccatccccaattagtcatcacgatttccatggatggcgaaacgaggatgtggtcggtcctcgatccaaccagcgaaatggcatcgacgggccgcatgcgaggagcctctcccttcatcagctattctcccatctgccagtctgttgttgccggggatgaaaacgaattcgctcgcgtaattccaattcgacggttttttaccactaccaccattgcgcggctcagcagcaccatctcggctatggcgcaatgcagttttcatcacccctgtgccctgtttggcagtgccgcaggcgaggtcgtaggaacgaatcccttccgacgagttgtttacaacaaggagcaaatttggcagcagatatggttcacacatgaatggattcctacttctaagacgaacactatgggcacaagtcgatttcatgacggatatcgggcagagaaccagaagttggcaaagtacaagctttttgagaccaaccccatcaatgggatggggacctcgacgatttacgaggaaaatacccacgtcacagccctcgggtggaaccccaaccgcccttgcgcagcctgggccagcgctgcgctggggtgtggattgctgagagtggaagatcttgccatctagtgacggcagccgtattgatcaaacaggcgatctgctagatttactactaatcatgacatgaggacatcatagtcgatctatgaaaagaaactaggtgacagtgaaacaaaatatgccatgttagttgtgtcagagtgggcccccagccacaccaattgcttacttaatgtcgctgtgggaaccccaccacaacatcgtggttggcagatacgccatgtgggttcgatcagatctcagctccacccaatcaaagctcatagaagccaattaaaaataaagtaaaaatataacccatggctggattgccgtcaacccagccaccgtagatccccagccgcctaattttggcccagtagaagtacacttcaccgtgatagtagatccttttcgtataacttttaaacccggacttgagttcttctctttcattctcaattctatcttctatccaaatctcttccaacattgcctatatctccattcaatctcaagcgtctttcccttctcaattattattgcaagcttcaatttctctctgttatcatgcatttctcttctgctgcagtcctcgccctttgctctatcagcgtgacctacgcggcgcccttcgccaatcccgagaatgaagatctcgctcgccgtgcaacctactctgtagtcaatgccgatgaagactgctcttctagcccagtcgcacgcgaagtcgacactgtcttcgaaacctccacagttactgctcctgatgccgacccagtgcccatcactgtgaccgtgactgccacaccttcaagcgtgacctctccctcaaccgctgtggctagccctacttcgtgctgggagacccctaatgttcttccaaccgctggctcttcgtctttcttccgcaggggcctgagagccgctggtcagccggctatctttgctcgcgaatactctagctctttgctttacgcgcgcgagtatcccaccgcctctgcctccgaatctctccatgctcgtggctggtactctgctgcttctggcactccttctattgcgacctctaccgcttcgcctacttccctcgtggctcgcaactttggtgattcgtactcttccgcttgggtcccaacctccagcctggtcactgccactcccctcgttgctcgtggcttgtactcttctgctgctacctcatctgcctcagcgacttcccttgtggctcgtggcttttccccttcttactctagcggaaacatccctctctcccctactcccttcgctgcccgcgacttgtacgcttctccctccggcacattctctatcccgagcatccctacttcagctgctcctctggctgctcgtggcccctatggctggtactcttccgctctcagtgcctcccccattgccacatcttctgcctctccagctatcgtggcccgtggtgcccgcagctggggctcttctagtgcatccagcaccttctctgcgtcggctactcctgtggcctactaagacagaccacatgagacaacggttttaaccttttgcaaatgaacacaagcaaggcttttcatgaagtgatgagatccttgttttatggcacgatatgattgcaacaacgaaaaagaaagattgtgaatgacttgatttatccccattacggctttggggatacatatttgactggcgtttttactggaagggattttgaaataactacaattcttcatgtgtcttttacttatgtggatatgggattgggttgcttttgcgttgggcctacatagactggatttgaatattgatgggtcccgaattacatagaatagttgcacgatgcactggaaataacaaaatgaaatgaatactttgacaattcttttgatatcatacttaattctccgatcaagagccctacataaatattgtcgacaatctcattggaaggctagggcagataaagagcttatgtaacgcggtgcgtggcggctgcacggtggttgccccgagagacgcagcggtaaacatgcatcatccctccgctcaccttcaacttcgaaaccttatgacctccaaggaagggtcttttgtgttcttacatttttttaaattatcaactgttattgtttcttattttttgttccctttgtacctgaattcctacacacttcgattgcatgcgcaagggctggccgagggtcaacatcgataacaatggggacagacgggcctacggtctgcatgtcttgtatgtggcattacactcgtgtaaatttgcactcgctgacaattgttctagttgccaacaatttctggggcaaagatgatgcaggacttcaaccaatgttggaccgcgtgcatgggtcaaagatcacaaacgacgaactgaaggttttttacagcggtacgtgacgttgacgcagccgcaataacatcgaattctaacatcttgttagctcgagccaccatcgaagatgaatacgcacggaaactccaagttctatgtcgaaaggcgctgggatcatgcgagactggatcgctccgagcctcactcgacgttgttcgtggcgagactgaagctatcgctaaggcacacgccgcaattgcaggacaaattaagacggaattggaggagccacttgctgcgtttgccagtggtattaaagagcgacgaaagattattcaacagtgcattgagcgcctacacaagaccaaaatgcaacaaacgcagctcgtcaacaaagtaagtaaagacggggagtgatgagaggtaaaatactaactctatagactcgtgatcgttacgagcaggactgtctccggatcaagggctaccttgctcagggccatatggtcatgggccaggaagagcgcaagaacaaggccaagctagagaagacccagatccagctggcatcaactagccaggaatacgaagcggccgtcaagcagctcgaggagacaactggtcgttggaataaggaatggaagtcagcatgcgacaaatttcaagatttggaagaggagcgtctggacttcacaaaaagcagtctgtggacctacgcaaacattgcttcaactgtttgtgtcagcgacgatgccgtatgtttattgtgcccgggtttattgtgcaatactaattcgacctatagtcatgcgagaaagtccgtctctctttggaagactgtgaagtggagaaggatattatgttcttcatcaaggagcgaggaactggccaagagatcccagatcctccccgattcatcaacttctgcaaggatgatgactcaagctctgacctagatgaagctgatggctactcggtagcccaattccaacgcactatgaaccctgcattccgcacatcttctcctcagccttcaaccttcgaatcacaccatgacccacagtcagagctcgcggctcaaataggacgacctactcttccagccgtgaacaatgcgccgccacctcagcagcaaccgctaccgtcacaacagcagccacccccacagcagcagccgttcatgccacagcagcctctcatgcaacagcagcctcttatgcaacagcagcctctcatgcaacagcagcctctcatgcaacagcagcctctcatgcatcagcagcctcctctgcaaccacaacaacaaccgccgctacaggcacagccccagcaacctgcacctctagacttccgccgtggtggcgcgccgcctccgaactacgaccccgagcaacatggagagatcggagctgttccccacaacgcataccccacagatggtatgaccatgttctgtcgtgccgggccaccctcagaacgaagctcagcgaccagcgcatatcgcccgtctagccaagactctcagagcgaagtttcgaactcaacctctatctctagtgtcgaggaaacacctacgaaaaagtctatagtaaagtcaacaaacagtgtgccgatgacagcttctggagatgacaaatcaccaaaaaagaagagcgctttcttcagcaacagccccttccgtcgcaagagtcgacatgacaaagaaaggcctgttgtttcttcacagcagggcatctctccaacgtcgctcgtttcacccaactccacgtctcgtagtggttgggactcgccgacaaaacaaatcagtccgacgaagcaaatgagcccacccaaacaaatcatcagcccgcccaagcaaatgagcccacctaagcaagtgagcccgcccaagcagattagtgcacccaagcaggctagcccaaccaaacaagtcagccctgtcaggccttcgggaggcctgccgggtcgtgcctctggcagcccggagcctgttgaccctcgagccaacttccagctcaatgtggggaacaatgtctttgacgtggcaaccccagaaaagagctcaccccagaaaggatcacagccgaatcaggcatctgaagatgacttggaccctatcgcgcgggctctagcagacctcaagacgggcggcaagcagtcagccactcgggtgtcggcagatagatatcacggcatctccacacccactccgtcgacatattcttcgacctatggtggcagcagtgttagcgttgctactccgcccccagcatacaatgatcccacagtcaagcgacttggcgcacctcaaccggcctttacagcaaagcaaatgcacaagacaactcagaaatatactggtcaaacccagagcatgcttcgaggacaaaacaacaataatagcatggggtctagacatagtggtcagacccaagacagtatgggatctagacatagcggtcaagaagccacccgagctagatcgccagcaccgagacggagcgtcagccctcagccccgtgtggatactcggatgagccagaacagtggcaggggcccgagccctactccgagtagttaccagtctaacagcatgcgaagtcaatacagccgatcgcccactcctcggcgtactcaagatccgtacactccaaacgagtatgctcggaggccctcgcccgctgcaagccaccgtgctgtatccccgaacccccagttcaggcagcaatctcgtccttctagctctggtggcatggagctgcagttgtctggaaaccacgatatgtacggttccagcagtcccggtggatatgctagctcagctcgaggaggcagccgcccctcatcgagttatggtgaggctcctccgcctgttggccgatctcggagccgtactatggctgttgcagagcctggacgtcaattcagccgtgacggccgcccaatcttgcactttggtaagcatttattcctcctcttcacaatgcgttgttagtatctaaccttagtccaacctcacagctcgtgctatgtactcctacaatgccgccatccctgaagagctcacctttggtaagggagatgtccttgccgttctccgtctgcaggatgacgggtggtgggaagccgaagtcaccaacgcccgtggccaccctggtcttgtgccaagcaattatctgcaaatcatttaataccccattgtactcacgacccgccacgaccctcagaacattcgtcctgaaggtgatgctctttttcttctcacatagataccacgcctttcgtctactttccttgcacattggcgatttctttctggctcagcttctattttgcttttattctcagcatggtgctacagtcccgtcttgacatcactaaacagcttgtttaatcttatcatgtttttgcggatgtttttggacactttagcgtttctgttctgggaatctttttactatgtgcttcatgtgaatttgttgaattcttttttttctgtctttttcctttctcgacagcgatccagcgaaattgtctgaaccctcgacactctatggtcttttatttttattcccgcttcctgccccaatcttcatcatttgcctttctctatgtttgtacgcttttatggaggatatgacgtgctttgctctaattgatgctctcctttctacgatgtatttcccatgacatatgtaagtagtggcctaaattgatttgaagacagtcgtgtatacttgattgatgattgcagtccctcggactggatgcgatagacttttgatttaactcatggtgcaggtacgttccagaggtgctagctttctagtaaatcttatgtctgatgttttaaaagtcattttcgactcaatgccaatgcttttgttatacatatctttcagtctcaccattctatatctttaatctttagtagaaaacatttccgacactcggtatccattatctaacagtatatctcgatcaagtaaataaaggtttacctacttaggggcttgtgagtagctatttcatttagggctgccaatgtgctctggagtgtttcctgttacccctcttcgagactgtcttcaaagcctcatgatctgaccgccttttgacgaaatccagagaaatgttcaattgacttgaatgttcttcagcttctccttcttctgcttcttcccagctataacccaccatgttatcaggtcgcatacgaccgcgtctagtgcgcgtgaccacgtccatcgtacggacacataccaagcgttccttatcaacaaagcacttctctccaaactggaaagcttacattgcgactgccggcttgatcagcacgcccggaatctggtggttgaccgctgcaggggatgatgcaccccgcctcgagtgtccattagcggagcacttggccccggagccgggtccctccaaagaggatatcacacatatgttatcgaaagaggcatactccttccatgtcagaaatattacaggtgtcaccagatacgacggcgcccagttggcgtccaatagcccctgtgaggaccggtttattcatggcgaagtttcttcatcgtggaatgaaaatgatcaatggatgtcctgggctgtttttgatggacattcaggttggcagacagcggacctattgacgaagcaactcctacctttcgtgcgacgcagattgtccgaagttaactcaccggtatcaaatgagtcagtgcagcgcgctatcatggaaggattcgtggacctcgatgattccattatcaagactgcaccggacacatctaagagcaaagaatcattccaagacaaggtcaaaaaactgattcctgcttacgctggttcatgcgctttgttgtctctatacgatcctatcacaagcacgctgcacgttgcatgtactggggattcgagagcggttttaggacaaaaaggagcagacggcaagtgggagacaattcccttgtcagttgaccaaactggcagtaacgaagaagagaccacccgcatttctaaggagcaccctggcgaggaaaacatagccaaagatggacgggttcttggaatcatggtctcaagagcctttggtgacagtctctggaagtggccgttagattttcagaaggaaatgaagcggaaattcaatggtccagcccctctaacaccacggcgtgatattcgcacacctccatacttgactgccgagccggtcgtgacaagtactaagattaatcctaacaaaccttcgttcttgattatggcaacggatgggctatgggattatctctccagtgagcagggtgtcgacttggtagtgaactggttggaaccacaacggacggagaagaatacgaccgaggagaacaagacagatgggaaatttgacttcggcagattctggacagatgtggactggcagtttgagaaggagagaatgacaatccaagatgaaaatgcagcagtacatctgatgcgtaactcccttggtggaaattaccacgagttgatagcaggccggcttgcctttgaccctcctttgtctcgacgggtacgggatgatatcactgtgcaagttgtcttttttaataccgagaagtgaatatcgatttcttggttggtctgaacatagaagtgtacctctaaaaattgtacctccgaaactcttcgggtgacggagaccaaataaagattacgaccatcactgatggatgtatcactcattttctaacaatttccatcataaattcaacaagaagagcctaccgagaatgcctgctatgtctcacctgattatacagatgccacagagtaatggaggcgttgctttgcgtactcgctcagatgattcctcggatgattcttcagatgaatctaccatgtggtgggttctatctggcgttctttggggaaccctcggcggttttataattttggcgacattccattattttagaccatttggttgtgattgtgtacgcaacatttcgcttgtttgggataaaattgctcggtaagtcgtgagcgatgataatatctctttctatcggtgtcgaatccaacagttctcatcaaagaaaagacactaacaggtcctgagatctagtgatgtttgtcgagctggatatcgaatcaaagatggcgtgaaagatgtattccaaaatgcattcaaaagggtatatcacctggctggtctaaaagcagcgcctcaggttatagccaacgaacaacaaactgcaccaggtaaggaagacctatccaaactagatactgtcaagctactgattagtactgtctttgttcagagcccatcgagatgcaagatatcacggtggaatatataagacatgaatctgatagctcggaagatccacccgactacgaatactacgggccacctgaggtgcccctgcctgtctacaaacgttaggagaactagaactaggtccggaagaatggagaggaataagaatgggctaaggataacaggatagtgtttttatattgcttgacttggcttccctgttgtgatattatggcgaatgtgacaccaccatgtggctctctatatgtttagctggtaaataaatagaatcaaaatgtagagagttgaaataagaagagaaaaatagaaaatgtagccattaagcatttaaggtaagaaacactaggtcagtggcattcgagttcttaaatgtccgcttacagtagcttcgatgcggagcgggggcaaggagctaaggggaacgaactattatttgaaaataaaacactgtcgagaataccatgataagtccgcttaagcggccgactattcttgtctctatagtaataaaaaaccagcggtgagctagggaaatctgatacggcgcactagcggttggagactggggtcttactcgcagggaagattagcatataactaatatgacaaccccactaaataggatatcgaccagaacttcttagctttaactcaagcgtctcatcctgctagtcttctttcagtgactgatgggttcctcgtagttcagttactaagatgttatagaaaagatcacgctagcagctggctctgcccacggataatgtacttgtctctatcagcactctttattcctagaggtgtatgccgaagatgaattattatctgaaagaggaccacggtcatcctgacgcaaacctggagttgagtttgtataacctaagacgtgcatttaagcattgactcgatatagaccatcctcacactattctctatcttcataccttcctcacctttactgacatatttacttgccaataatggctcctattcccagcgacaagtctgattcagcatcagaatcaccaattgatttggctgctggatatttaggggtacttatactagcaatgtgtgctctattgttgctcatgcttgtatgcgccatcgtgatccggtatctatgaccaccgagaactaagattgaacatgatgatcttataagaaaggcaaactttacagagaagctgatgctaatattactgtcattctgctagacatcatatattgaatataatcggctgctggatcaagaactgctacatccgagcaaaaacagctctcggcacaacgaggttgaaagcaaaatctttactcagcacaatcacgctgaagaaaactagaacccaaagttatggtgagacctacaccccaaaaaccaactgggtgctatgataatgtctaacctgacatgccgttatcatacagacccgaaaaatacttccgatgtgaggctgcagtacttggtccctccccctaaagcggctcataccaccacaactacaatcgatgattctccttgcagtctgtagacaatgggatttgcacacgattctcaggggaagcaagactctacgggtgaaaggatcgggacatttgaggtgatagattattctagtaaggcaattaccaattaccaatgctgattgctatattcacgtattcatgaagaatcaattcgctaccattggcattttggaaacattgggttgagtgagataagatattcgagatattaaaaattctaaaatttacaaacctggaataagataaacacaaagagaatcattcacaacgaatagcctgccgaagaaccaaagaaagaagctagcaagtattgacagacaggggtatatgaagaaaagacaggcttcgcggtaataattccagcacgtgcaattcccgaaggatcatattcattcatcatcaacaaaggagttagctagacggccaaaaaatgggacttcaaagtggtccagagtatcaactagaatgatatgataagtataagatctatctttcctgccaacgaacagctcagctgtaccggcagctcccgtgaagaaccttggaagactcaccatctcggtaagcatgcatgctaaggaagccgatcaaagcaatatcgataataaacaaaacccaggagagaaagcttgaccagcagaacagtaggtgaatgatctatttggcatgtgagcgtatgcagtattaagagggattggaatacacacaaacatggtagcaaataacatggacgattgccaagcatggaatctacagtagatagtcagcaaaccgggattccaggttattcaaccccttaataaagcctattacataccgcacataatcgctcttatgttcagctagtagtaggaatacaccccccgcgggaggcagaagcagatatgctagtgccgcttcgatatccatgcgaatgggtagacttgtttcaaaggcccctaagctcacatggccaccctcgatgtctcgtccaaatcccgtgttgccatatccgttgctagcaaagtgactgggcgagggtaggtcggtcgaggctcgcggtgagcggaggattggagatattcggtggctgtcggggtggggaggggatagagcgcgctcaagctccggggattgatcttgataaggggcgaagttcatcatgttgtcataccttgaaaggtgaatgacggaatgatcttcgggcatcaggggattaatttggagtagcatctccttatcgttatcagatcgcgacgcgtaactgcccatctgatgcctcaggcgacaatatataaagtaagggtatcatatcattcagtatcttcatagtcaaagatttattatacataaactagcgcagtccatctagactctcccccgaccgcgagcaatcccgctacctcgtgcaatcccgctggctggccgttgggttgttgtcgtagaccctcgtgttgccgtgcggcttgtgctgacactgggcgttcttcctaatccagtagttcgaactgtacccctcgtagttccacgggtgcctcgagtaccccgagtgacctgtgcgcgtcgtttttcgatttcctcggcctttctcgctgctgcttctcgctgctgctgaagtgcctgttcgcgtctttctgccgcttgctgtctttggatcgcttggttctcgatatcgatcacatcctgagtagcgccttgccaatcggggttgaggatcagtcgctgattatgctcagtttgggagagaatgcgagtccacgtgttgaggagtgtcgaggccgacgtaacggtttgtgagaccgtctatacggataattagccaaagtattgaccgtgcattatgagaagaatatattacctccatgttccctttggcggaatccaaacttgccagaagcccttctattacttcgttgatattccgcacaccttgtaattctgtccggagcgcagtctctcgagactgttgatgatcaaagagaggatcctcgccatcatgggaagctcgaggttctagtgtaggtttctcatcggaggttcttgggttgatctttttgcgggtcactctcttggatggtgaattccagaggtcctctgtgtcatcatcagacagctgaagcctctccatttcttctgctgtggtgcggaaagccatgttgaattttcagagcaggagccgaagtatgtacaagcaatctcgatagactgaacacctgaatgggcttagttttgggataactgtgagtccgaaatagttgaaggttaattgacagccgatgatcgacaagactgacagttttaagataatcaaacaagcaattggggtagatcgaaataggaagtcaacattgtttgatgcggggttttcagccaccgcaattatcgggcggtgaagatacccggtggctgggcgacaatcggctttcataacaacttcgtcctcccttcatccccaacttatcgattttagtttcatcgccttggacaattggatatctgcaagatcacgcttcataccttctttagacttttatatctccgggtgcttgcctgattttgaatatctcacaagtcggacgtggtacgcccttgattgaatcaacgctccttttcgatactttatcaaaatcgccaaatccagaaaaagccctgggatagattgtgatatactatttatacttctactcgaaagatcgcaacccttcgaacggttaatcaatcgtgattcaagtcaatatggcgtcaacaccaccgccgccttctccgtctaagcttcgtgtacctagagcaccgcgacatggggcgaagcatgacaactatgaaccttaccctacacgttactctgctagacttgctggtcaacgagcgtcaagggtccaaaccacaccgcccccaagccacccaagcacatctgccaaacatggagcagctaaaaggactctttcgccctcatcacctggcactaccaagccctcgcccaaaaagggtgcacactctcacagaactgctgcctcccgaatttccccctttgattcggaactttcacttccccgcacttctgcacaacacacctcacgttcctctgcagaacgagctttacccacaccagctaaaacaccttcgaagaagaaggtaatcagttctggctcttctacatctcgctctctgtttccttccacatccactcccaaacgcagaaaaatggaaacccccaaatattctgccgcagaatccctggacatcttcgtcgatgagcctttgagagcgtacaacattgaaactgccgagcaagaattgggtatctccattcatgaggactcgcgtgatcgcatccctgtgatcggtccactttcgactgattcgttcgttaccaaggcacgagcggtcggacgacctgctactcgctcaaccaccagccacaaaaatggagcctattttgtccagtaagtcaaacctcatgtacccgtacccaccatattcgcatattctaacttgtaatttaggcgtgggaaaaagatattcaagcgctttgacgacatggaagatgagggcgaggatgaagacgaccttggccttttcgccaaccgccctgacctgttggctgataaccctgatattctcaagagtgtgaagcctttgcgacgtggcgacatcaagcctcgtatcctcttccctgagcccgctgagcctaccgataagcacgctgaccctaccgatggtgcggaggaggatgtcaccgatgtcgaggatcacgagccaacgtctccaactccggcttatgaagaccagacatatctgactcctcccgtcttgccagatctatctaccccctcctttgaatctgagacctcatctgtctatcacactgcccccgttagacgtactggcctccgtttccatcgccctgccgtggacgatgtgacacctttctctttttctgaggacgttagtttcggctcttctaatggggatcaggctcgatcccgaggcctctctgtcagcagtggtagcagcctcctgaagtactggccgtctgtcagcaggaagacgcgggaggccgaggcccgcaccgaccgcaccaagcgtcttcgcgacgcgcgtggtagccctgctccacgcacccgacaggccgcgcgcgcggaagcatccgcggcctcgaccgctgaggcatctacgtctgattcctaggtctccaaggtgtcatctttttttcacgactttgcatcattcagcgctttgggaatttttacttttctttcatttgcgtgcaccggacttggcgcgaagtgcgtgccaatcttttgtttgttggttgcgcctgggagcaaccttttcgtcggctttcttttccttatgccgtcttttctccccacgacagccatcttgtaattgcgcaggccgctgggtttctcttgtctctttgcgttttgttgtttcagtggcgcgcgcgggcttgggagtcgtgaacactaaggatacctcatgagaacatgtattaaattggaatagcggcgtttcctcctgtcttttcatctacgctcttgtttctttctttctttctattgtttctgatggtaccggcgcattcgtttgttgtttcattcatctggaagcggtttattggtcatcacgggaggaatcatagtaaaacgggacagctcaatagaattcaggatatctcgaaacttttcctgtaactcctggtattaagtccctcgcaaaggcatatttctctgtcgagaaagactgccatttggtgtagtcaaaacaaactttcggtagtagccgggtgtacttatccacctggacattgtagacaaggggacaatacaaatacatgaatcgtcacatcgattcactacaggggttgtatctagccttctcctcgacaaatccaacaaaaaggaaatccgcccagtgcagccgggacatgctttttattcgttacagcgttataggtattcctgtccacaaggagaactcctaggtcgattagtgaccagatggatatcgccatttgaatccgtcaaatgaattccaggtcatcgtcatcgtcatcatccaagagtgcctgtttcccattgagcgtggtctcagctggcgcacccaggctctcccggccagcctccctgataccccttgaagtgatgaaccgcgtcttcttaacaccactgccatggggtttgtcatgagcacgcttcattgggcttagacggacattcttggctttgccaaaggtggtcatatccatgccgctggttgtcgtggggctcttgggcaaaggggtgtctgctgctttatctttgttgggactctcgttgctggtccttgcgcgaaggtactcggcgcccacaccaccgacacggccggtaactagcttttgggtgatgtcacgctctcgctgctgggtcgcaagacgtctgcgcattcgttcctccttgctctctatgccgcggcctatcatacccgaagcaagaaaaggatcgtcatacgaatcaatcagatttgccgccgagtctcccatgggattctggaacgaacggccagccccgcggtttctggagggcgccacatagtagagcgattgagaccccatgtcatactgagggccatcgtatctcatgtcttgcttgaaaatagctgctcgcctccttgtttccccaaataatccggtgcgcgagccagatttaccaccgggaccaagcatacccgtatcagcattgactcccgagcgttggccctgggtgcgtcgaacctggatatcaacgtggaagtcacagaactcggtctttcgaccatctatccaggattcgcaggtctttccgtcttttctcacagccttgcagaacccaatatcgcgtgccttaccaatttcgaggaccttgtcatctgatgaggacaaggacaagctgaatctgtttgtgtccagcttgtgctttggtggaggcatgatggtggggttcagaattgcgatgagagtcccttccgagattttgtaataacgggggaaagcagtgtcaaaaaggaagaggtcaatagtccatttcagatcggtcagggtaatggccatatatctgttcgtattgtttagtccatcatcataagggttattttctttagccgacgcgttccccgaagctttcttgtcccttggggcggacttggacgcaacgacgccaaataccacaaagtccccatcgatgtcttctgggagctcgaatgcgggtgccttgacggttttgagtagatcaggaatgcgcaaaactttcgtttctgcgagtgtgcggctcaagaaagaatgtggaagaacgcggcttgatagatgtagcgacgaataggactcgaattttgaagaatccggggccgccttcactaaagcatcgtctgtttggtctaagtcgtgagatgaacttggttcttcttctgccgtatgagttcgcctatgtagatgagattgtctctcgttgtgaccactgccctcggttcgtcgaacattcggagttgtgttactgcgttgtagaccggatgggcgggattgtcccatagatcgaagaatatcctcacgactaaagctttccgtcggccgctcttgtgacaacgacggtggaggggaatgctttgtatccgaagctgcagctttgaaagcctctaactctgacttgtcgacttgaaaagccgaactgcggttggcctgattggcctggaccctttctgctctctctagccgagatttctcagccgccctgccttccgccattctctcgctgaaagattttattcggttgattcctgctgttgatgaaggagaactctggggccgtgaggcgaatatgtcattagagcgaggcgcgacactgtctcgaaatcccatgtgactacttggtcgagggccgggtcttgagcttggaggtcgtttcaaggatacatcattggccttccagcccttatcaatgcccatcacgtacctccgaggcgatattgggtcggtgggaggagcttctcgcctagtaggtgatgccggaacctggattccatcgctgctcgttctttgtttcccccccttggcgattcttggtgttgcaccgcggtcttcttttcgcaaagggcttattgcggagtttggtcgaacatcttcgtcgtccaaattcgaattagaccttccgcgattcttttgctggagtttcttcagctttaagcgcgctttgatctcggctagttgaagctgcagggtttcttcgtcttcttcttccccatcatcttcatccacaatttgactcgcttttgatcggatattgggtgtggttcttgatcgcttcaatggcgataccaggtttcctcgagtgcgttgcatgtcttggtactttcgtcgtccagctggcgaactcaagagagccgcgcggggtgattgaggcggccacacaggttcagccactttttcaggggagagtagttagtcaccgattagtctaatcgattggagggaccgtactggcgatcaatgagaggattcagacgtaatggagaccgaatataccatggagcgtcatttgcggcacgcgccctttacccttgcgcagagtgtagaattcgggatgtaaaatgtgtggaaggtgcagtcacaaggataacagagagctgagagccgaggacagggatacaataacaaggtcaggctgaaactcgctaatgcaaagggaaagtgacggatcgcgcgcacagggctgattggatcgggaaggcgcgttcgccgcgtcgcgcccttgccattttagccccttccgttcccacagatcttctagtcttcaccctcacttccacctattatcacacaatgaggactcgatcagcgccagtgtcaaaatcaaagaagtctgaagacgagacaaatgccaaaaccctcgttgccgcagagaaaccgagcaaaacattcatccttccatcctcaaccagcgacaatgcgcgactcgtctccctaccgaatccccagtcgggagagctaacacgctacttcttctgcccggatcgcggtatatacgaatttacggttgttgcaccaccggcgcatatggcgcggagtatcctgttcacgcctcgcacgcgtgaaacctccaatccactggacgaagagaagaaagaccccgaaccctccgcgcagggttcaatcacaaagaaggcagagttcctggtggcaactccgatcgatgcactgtttttcatggttccattgttagcaccttcctcgaaatcaggccgttctcttttccagccattcgacgatataattgattcccaagacgatatgccaaagcatctgcgccaagtcctttatgatgatgaattcagagactccctcctagcacgggcggaagctatctgtgaagtggtccaggctggtgatgagaagatgttccggttcaatgagacaaggcttgtccaggagttgatcacaaaggcagaacgtatggcggatcggggtcttcctgttagtctggaagaacggtttgttcgtcaggcactagccacgcccttgatgtcggtcaaacgagaagatgttgcgactagccaggagccatcgaacgaaagccaggattcggcctcgaaatccgaggtgagggacaattcaccctcgactgtggctacaactgcgaccccgtctattgggacacctgcaggggagtcgacacctgtgcctcaaccaccgagtgaagagtcgacagcttcggatcacactactcggctcctccgaatttccactgcactagccttcatgaaagaatcatatctgcccgccaccatggcctcgagacttgatgagatcctcgagtctgcagagagccctatcgatttcaagccgctgaaagaccgtctcaaggagattacggaccttcgtgctcaagccctcgcatcacgcgacatgtccaacttcacccggaaacgagcccttgatgatgaggaagaggatatacggggcgagaagaaacgccgcaaggatgaggcggagaaaaaatccaaggctgcagaatcccaagcagttaagaagctgaaaaaggtcaatacgagcgggatgcagaaaatgagctctttcttcgctaaggccgcacctaagaagaagacttgaaggtctctgagacaaaaccaactgaactataacatagccgtatattatacaggtaattcattgccctggcttcggaggaatccaaccagcaagttctaaggttgaaagattatgtctataaatctggaggccagagcctcctgcccagacagagcaacctactgccagtgcaaatgaggtcgagttgagatcctcgcctcgctccgcaatcccaactaatctgcgcgatttcttggaaggcaattacagtggctttctgaaagtcaccgatgcccagacgatttggggtatctttcttcgatccggcgcatctgtgtacagcttcatgtatactatttactaaataatccatgaaagataaatgtgattttatattttggattttggattttggattttggtaccagcgataaccctattcgggtgggctttgcgtcaatctgctatgtaatattcaaagagggatccggtcaatagcagcacccgtaatcctataaccagaaacattagccatcatccagtcactaatgtatgccatcgatcaaggtgtggggaaggaaacaacatacaagaacgacccattggatggcttgctaataaccatagcctcctccaatttctccttgctgatatccgggaacttcttaagataatattcatccctcaacgcagcagtaacagcctccaccttaccctgaggcagcatgtgaacggtgcaaccaccccacccagcaccggtcaagcgactaccccaagtacccgcacgacgcgcaatagcacagatctcatcgacctccggtgcactgcagtcatacgccgtagcacacgattcctgcgactcgttaagcaactgaccgaggtagtgaatgcgcttctcgtctagctgggtagccttggtgaggcaagctttaaaatcaagcacacggcgcgcctccttgaagcagtgcagcgctcgttggcggagcaggaaccgctcggcttgcacagggaatgcggagaggaaggtcgactctagctcggctacggtgatgtccagcagctgcgccatctcctcgcgcgtgtacccctcttcttgtgtgaatacgttcatggtcgtttggatcactgagtcgatttggtactctagtggatcttggacacggccttctttagccattagctcgttgtggaagttgcgcaggctgtagccgagggagctgttgtccttgggtagtgtcacgccgtggtgcttggcgaggatcacggcggcgagggtgcactctgctacgcgcaggttgtagtggcgcggggcagtatcggccttgttggaggttacgaagctctgggccatcaggaaggtgatttcgtcggaggatgtggggattgggacgtgttggacgttgaatctagggaagaattgggtgtagagcaagtagccgcgcttggagaagatagaggctgcttggtccatactgtgattacgcagtgatgttagatttctgtcggcttctgtcgtccgttgataataactcacccgccagaatagacgccaacagcgcgctccgagacaacagccagatccaacaaatcctgcttggagacgttgtggttattggccttcaacacagccagtgcactagcgcacacgaaggcagcactgctggagataccaccaccggggggcacattgccgtcgaccaagatctgcatgctggcagggacgagcgagccatcgggcttctccttgcgcaggaacttgagggcgcccgacaggccggcacggaaataattcacccactcgtgcttcttggggtcgatctcgacatccttatcgtggggcacgctaaactcgcgcgtggggaatttctccggcgagacgttggcgattgtgatggtggtgccctccgcgctggcagtgaccaccttgacagccatgatcacgtcaacgctgacagcagtcggtaggacatcgtacagtgagtagtcgatgtgctcgccgatgatgttcacgcgaccaggactccgcgccacgaaatctgggcggtggttatatgtcttattgaactgggtgatgagattggtccatcttttctggtgctccggtgcaactgaagtcagcgaggcgtcgtctgttgcgtagacttccgcgatggattctgtttgcggcacgagctcctgttggggtggcatggcggggtaagggaaggtcgaaggcggggaagtgaggagagataagaatgggaagaaaaacaaaggaaccgaagatgtaaaaaaggagaagtagtaggagtagagctgaagtagtaatttgtgtgtaattcctcttcaaccagatgtctccatattccccgattccggataaagtggcacgtggggttgcagtagggccatttttgcctttttgagggattccggtggttgcgtgtagctgctttgcggggattgcccccggagtctccattcatcaataactccacgctttctgattggttggttagtttcctctcgcggcggctttctaccggattaggctatgacggcattttctattctatagacatatgttgaatgttccatctctgcttcttgttctggctctttaattgtacctaattcatccctaccgtaatccccttatatccacaacatggccttgctctacgatgtacgtaggcatgttcctggactgcggagtctcgagccgaccgcatgaggtggcggtatcccgaaagtggacctgaagatcggcattgtgccatctaactacggcccgatagaacccgagccttcaaaggataaaaagactatggattcaaaaaaaaaagaaaaggaatggttggaaccctcgactttggcgttattagcaccgcactctaaccaactgagttatggaaccagaccggaacttctgccagtaattgcctactccaataatcatcatacatattaaggactcatggagactcgttttctatttaaaactacgcggattttggggataaaggaaatatcgccgccagaaagagcatcggacgatggcattcttatagctctttagatagtatgtttgaaaatccctcggaatttccgagcacagtctgcggtatatatgttgtgtatagaacctggtatactccgtacatagatggttgggcaaccagtgtatatgttgtacctaaatgtgccaataatagtttgcatgcggggtttcgagctgatcccaagccgatggtattctgtcgtctggttcaactcgatctaattgtatatacccattagttattccaagaatatagagaatttgaatatacctctacgaaataatccaagtcaaggcgcagaataccagtagagaaaatctactccgaaacaacatgataattgttgacttgtttggataggtgatcaggaaaaagaccagcgtagccgagcaaaagacctcggaggctttggtattagcagatcatgaagtaagggatcaataacatcgcatatactatatacaaagggcgcaacaggaataagatccttacaaggtacttcgtaggctccagacgctcgggccgatctagaccctctagaccgaaaagttcgggggatctaaagtcaaagttccggtgagttttgtgtagtaggggcttgactatcgtgactttgaagtccctgtctctggtagacatccactatatgtctaattcattaatgatttgttgggaggtgtacaatagatatgtgtacaccgtacgacagactattgttgccgaggacgtacgggaaaatcaaatcaggtgaccgagccacggccgaggtcggagggcgcgaaggcgcatcaagccaatcagaggccccaaatttcttgactcagagcggtcggacattttgggttaggcgttttctcggaaaccccagagacgagtcactggtaatcttcagcggtcaattggcactcatttttctttactttaaatcactctaccctcagtcttcctggcttggccgtcattcacgatgatgcctttaagaccctcaaaaagtgctctgcgagcattccacctccagaaacagcttgctggacgtcgacctttttctacctcatttgtggcttcggccgcttcgccccaccgctcctctgtccaaaagcgtgctcagagcacagctacggcttcaaatccgtgagtttttttgtgcctcctatgatcaaaatgtaattgcagtttgattctgaactttttaatcgtcagggagtccagacccgtgcccagtccgtcattcaaccaggaaccccatcgcaatgagatttctcccttgcaacaccgccagctccccgagctcgatgactcgtatgttaccctgaggaaattttggacacatgaaaactaattagttggtataaagaatggttggaatgagtggtggcgagatcttccacgagatgatgcttcgccagggtgtgaagcacatctgtgagtacttcatgcttgatattgcacaattggccggttctaatatttgatgtgcagtcggttaccccggtggtgctattctccccgttttcgatgctatctacaactccaagcacttcgatttccttcttcccaagcacgaacagggtgctggtcacatggccgagggttatgcccgtgcctctggcaagcccggtgtcgttctcgttacttctggccctggtgctaccaacgttattactcccatgcaagatgctatgtcagatggtactccgatggttgttttctgtggtcaggtccctaccagcgctattggaaccgattccttccaagaagccgatgtgatcggtatctcccgtgcctgcaccaagtggaacgtgatggtcaagtccgttggtgagctacctcgccgcatccaggaagctttcgagatcgccacgagtggtcgtccaggtcccgtcctggttgacctacccaaggatgtcactgctggcattctccgcaaccctattcccatgcacagcactatcccttcgctccctagcgcagctaccgtggcggcccgtgaaatgagccggaagcagcttgagagcaccatcaaccgtgttgctcacctcgttaacattgccaaaaagcctgtcctctacgttggacagggtctccttgctcgccccgatggccccatgatcctcaaggagtttgccgataaggcatgcattccggtcaccaccaccctgcagggccttggtggatttgacgagttggatcccaaggctctccacatgttgggtatgcacggatccgcttacgccaacatggctatgcaggaggctgatctgatcattgctgttggtgcccgtttcgatgaccgtgtgactctcagcatccccaagtttgcgcctcaagccaagcttgctgctactgaaggccgcggtggtatcgtgcatttcgagatcatgccgaagaacatcaacaaggttgtccaggccaatgaggccgtggagggtgactgtgccgacaacctccgtcttcttttgccccatgtcaaggctgtttccgagcgacctgaatggttcgagcaaatcaacgactggaagaagcgcttccccctgacactctatgaccgtcagaccgaggatggtcctatcaagccccaggctgttatcgagaagcttagcgaactcaccgccgaccggaaggaaaagaccattatcaccactggtgtcggacagcaccagatgtggactgcccagcacttccgctggcgtcaccctcgtaccatgatcacctccggtggtctcggcactatgggcttcggtctccccgccgctcttggagccaaggtggcccgtccggactgcctcgtcatcgatatcgatggtgatgcttctttcaacatgactcttactgagctttccaccgctgctcagttcaacattggtgtcaaggtccttctgatcaacaacgaggagcagggtatggtcactcaatggtaagctgttccctccggtcttcctagtatatctggcttacttttttgttacaggcaaaacctcttctacgaggatcgttactcccacactcaccagcagaaccccgacttcgtcccacttgcaaaggctatgcgcgtcgctgccgacaagtgcttcaaaccctccgaacttgaggagaagttgaagtggctgattgatcacgatggccctgccctcctggaggtcatcactgaccgtaaagtgcccgttcttcctatggtgccttctggccgcggtcttcacgagttcttggtctacgatgaaggtacgcaaacccctggctagtgatttaggaaacagcattaactcatttattacagccaaggatttggagcgcaaggagctgatgcgccagcgtaatgtcgacttccatgtccggaaagagtaggtgactagccaatgtcacctcgacaattcatatttctatactttgatatccatggcgtttcttggctggttcaccaaaagcgattagggcaatatctgtctaaagatgaacaaaaaatttgtcaaccgggttgctcttggaggtctctttggcagagaagtttggtgcacgcgggttctatatacctgttaggcttaacctatcgctatatccttgaaactaccatggtgaattgcatgaacacgtgctccaccatggcctttgatcgatgttggccttctctcttgccatgttgctcctcttgtatataatcatttgacgtctcgggttcctcgatgggacttgggaaattgatatgtttgggttccattaaataggggcagttagtcattgaaagcatttacctcttgtttcattacgcgtcaatgaacacttccttgtatgtttatcatcctagatggcttttatatttgtcacttaaaaatgtacgtagctccagctctggtggtgttctttcataatctaaatgtggaaccaccttcctaaacgggtaataggttggaaagcagagggcaagccatataggaagcaaagtaaactgcatacattctagctattgctttgccttttggcatagtagagcatgtcaataaaacctgcagtcaaaaacgaagagccaaggctggatatgcctaacggatggtaacgaaagaagcctacccacatggcagagcatacttatccaaacaggcgattataccttcgcacctgacacatttgcaaacaatatctctttctttccgtcccattaacacgctcgctttgatcacgttctttcatataccctagggcttgcataccgcacagcaaacgaccattaagagtagcatgttatattcccctcaaccaccttaaccttcacaaatcacaccttcttttgataccaccactctagagacatccattttaaccatcttgttcctatcaagaacctgactagggaatgatactagatcatggactctaagaggtatggtttagatctctcttacttttgcaagatattacaatcgatttgagagatatctgaatatggttcgagaacctcattgctaacccatttaatctataaaaggctgtgccgtgatttcgccaaaggcaattgccgatggaaaaactgcaaatttgttcatgcaagcaatggccaaagtcaaagccacagtccaacaatcccagcaagcccagcaagccaggtccaacgtcctgagccgctgccccaaagatcttgtatcttgccaaatgcagataaggagtttcgagcatggcaaaacagcattcctctacgctcgacggtcactcgtccatcctctgggaagaaaacaactctcttccagaaagcgagggaactgattggatctgacgccagtattcgacaagaagtcatacgaacattggccagtgaggatggcctgcgcctcatcctggaccttgtccaggaaaactttgaagaaatgaatgccgcaaccagagacctgcttttcaagactcaggtgctaccatttctagagacaatcaccaaccccgaggttgcatcctctctagtattggaacaggcagtgggcacaatctacaatgtcttgtttggacttgacggatccagagcagcgcgatggctcaatttcatctgtggcgttctcgagatcgacaccaccaacgaaggcagtgccatgttactggaggcatctctccacacgttctctcgtatcgcggacctgaattctactgctcctgtccaggattgcctgcatgccgttgcccagagatttgaaactgtgttgacctcgatgaatgataagaatggaatgagcggcagactttaccagtctcggatgcaccttgatcgtcttcttcagcgcatggagactggaaactcgctctcaactggtaccacggagaacaaagtcaagaatgaaagcaacgtcgcttttgtcgccaaccgcgagacgcccggcggcagacacaacaatgactttgacgatatctgtcagatcaagatcatgcccacctttgaagaaatctgcagccttcgaggggagtatctgcccgtcaataacccacttcaatggcacattgatggtgtcgacggattgctagatcgaaactttcggttgttgcgagaagacaccgtcggtcaacttcgagatgcaatccaccacgaactaagtccccgtgcgcagagatcgcaattgcgcaggttcgtatatcccaattccattgtggtcaagctcgagttcaattggctttgggggttctacttcgaagtcgacttccctcaacctgctggagtaagaaacttcacacctaaggcccgagagacgtggtggcagaactcgaaacgtctacagcccggggcgcttgtgtgtctaatcgttcaaaaagacgtggttgtgttttgcactgtgacacatcgtgacatgtcaccgaggtacagaaaggataccccctcacaggatcacgtccccccagagaacaaggcaaatccaagaactttatggaagagcgccacgagaggctcagttatgttgatgccagttgattctcggtgcaacaacactcaagtcgttctggaccttttcgactccaaaaaagccaatatgtctctggtggagtttccaggagtcattcttccagcttttgagccggctctcagggcacttcagtcgatgaagagaaccaaaaatctacctttctcggagctgtttgtcccgtggaccttcgacgatttcaacttatttgacatggcccctcccttgtatgctttgcagcctggttttgctttcaatctccgctgcctcatgaagaatgatacgaatttctacgtccgcgttgatcaaccatctaacgtgaaatacgtacaggataattccaccctggatggtgcacaggctcatgcattgatcagctgtttgaaaagaaagctcggtttgattcaagggccacctggtaccggcaagagctacactggtgtggctcttatcaaagtcttactggcaaacaaagacgctgctgctggaggaaacctggggcccatattatgtgtcacatacaccaatcatgctcttgaccagcttcttgaatctttactggacaacaaggttacatcgcaaattgttcgtattggatcacagtccaagtcggagaggttggaaagattcaaccttcacattgttgcgagagatacaccaagaacaaaaatggagaaaaaagaacgatggagtacagctgagatactgtcatattgcgaagaagattttcgcgcgcttgacctgaaaaatgaggtctccattgcgcgtctcaagtcctatatccaacgaacaaaccccagccaacataatcagctgttttcactggtccaagaagatggttctttgagagtacaaaaagacaacccccagaccgcgatcaactcctgggtggattcagcgcctgcaggcagtgctcgtgcacggcctgtggaggaactcaaaaacattaatgtcttcgagatgtctcgagaagaacgacagcttctttacaaccgctggtgtcatgattaccgggcagaagttgaagaaagagttaggcgaatcgtttcctctcacgagattgccaaaaagggatatgatagcgtccaggatgaaatgcaccttcgctgcttggctgaggcagatgtcattggcatcactactgcaggacttgctcgcagattggatatgttccgaagacttcaatgcaagttcatgctgtgcgaagaggctggtgaggttcttgaatctcatattcttactgcgtttctaccttctgttgagcatgcagtcctcatcggcgatcagcaacagcttcgtcctcaagtccagaattacgatctttccagcgagaatcatcgaggtggagcacaatattcactcgatatttccttgtttgagagactggtgagctcaaacaaaagccccatggactgtggagctcctttcagcacattggaaacacagcgtcgaatgcatccgtctatcgctcgtctggtccgtaaaaccttgtatccaagtttgaaggatgctccatccgtttcagagtatccggagattatggggatgcggaaaagactgttctggttggatcaccggcatcaagagggaggatctgacggcgattccatgtcaacctctcactggaatagtcatgagattgatatgaccgttgcactggtcaaccatctggttcaacaaggcgaatacaaacacggagacattgcagtgttgactccgtatctgggccagctccaccgactacgaaaacggttcgatgaactctttgccattatggtagggaaccgtgaccgagttgagctcaaacaggcggggtttgcaggttatgaaaccaaggataagcctacgatcaaagcagccttgtcagaaactcttcgcatggccaccgtggataatttccaaggcgaagaagctaaggttgttgtgatatctctagtccgcagcaacgcaaagaaccaatgcggctttctgcgcacttccaatcggatcaatgtcctgctgtcgcgagcacaacacggcatgtacatcattggcaattcgcagacctcaatccatgttcctatgtgggctcaagttgtgaagattctgagacaagaacacaatatcggaaaggccttggagctccaatgtcctcgccatccagatacaccgattgtggtctcgacaccagaggattttccaaagttctcccccgaaggaggttgcaacctgcgctgtgtcaaccgcctgcgctgtggacatgcctgtatccagaaatgccattcggatgtgcttcacaacgctgtcttttgcctagagccttgccctcgatcgttgggtggctgcaatcacccgtgccccaagcgatgcggggatcgttgtccggaaaagtgcatggtcaacgtataccaaaaggacaggacacttctttgcggccatccaatgccagaccttccttgttggcaggatcaagatatctccaaggttcgctgtctggtgcctgtggacaagacgatcctagggtgcagtcataccacctcactgccgtgccatatcgatgtggaagcacaagactatcgctgcctcgctcaatgccgcagcctccttccttgtggacacttatgcaagaagatttgttaccgctgcatcaccaaaggacctgagagcgtcccagctaatcatggaaattgcgaacaacggtgtgatcgaaatcaatctacatgcgctcatacctgcagcattccttgccacgctgagaagccctgtcctccatgcaaagctccttgcgaggtgcactgcggccattccaagtgcccacgaaaatgctatgagccatgtactccctgcgcggaagaaaaatgtctttcagcgtgtcctcacagcgtctgttcaatgccgtgtgcagccccttgtgaccatgttccatgttccaagcgatgcgagaagaagctcgaatgtgggcaccagtgcccgtcagtgtgtggagaaaaatgtccctcgtcctccttttgccaaacctgcggaaacgaggacatccataatcatcaagtcgatttcatcctgggtgaaacatacagagaaatcaaccttgacgaaaacccatgtgtattccccaagtgtggacatttcctgacaatcgaaaacatggatgcgcaaatggatatggctagctactacgatgtcgacgccagcggcaagcctgtctctatctgcgtatcattggcaccgttctcgattcaagacatcaagacatgcgccacctgtcgtggcccattgcgagatatttcccgatatggtcggctggttcgccgagctatccttgatgagtcaacgaagaaattgatcatcttcctcaatcaggaatatgtccctcttgcacaagaacttccccagcttgtccgtgaattgcatgaatgtgatggccaaagaatgtatccatggccagcggtgattgagatatctggcgcacgaagccatcaaatccagagcatgggcgagatcatcgagagcacaaatccaggtcgatgggatgcaatccttgatctgcgaaagcgtgtcgatctctatcggcaccatgtgaaacccgaagagcaaccctttgaaagagttcggagaatgatcgaaaatgcccgacagcgccaaggcctcacaaccaaccctaagcatgtcgataatgtgctgcagacaaaaggcttcctacaaggcaccgccctcttgatccgcctagacattgctttgattgttgaccttttagatctcggttcccagggacgacctcacttggtcgcacctcgattcgagcttgacctacagaagatgaaggacgattgccagaccctcatccgccacgcggccagtcaccatcgacttctacagcaggcagagggtcatattttcttagcacagctctatgccctggaacgagcacattgcttgactccagagaagaggaacaatatcttgatgcatggccaggcttccattcagaaagccaaaggtctttgcgatgcacacccaggccagacacgaggactggcagatgaagttcatagcgtggagaaaatgttgcgcggaggcacattctacacaattatcaccaacgaggaacgcatgtcagtcctttcggcgatggctcaagagttcaggggaactggacattggtactattgtcgcaacggacatccgtttaccattggagactgtgggttggctcgggagataagtcgctgtcccgagtgtgatgccccggtgggaggtgagagttcggaattggcagatggagtgagactggcggtggactgggatctggacagggagagattgaatctgtagggggagatgggttgattctgttgctctttgcgctgctcattctttgtgtgcatcctttgtgattaggcaactcaatttgcgtgccgtacagcaggtagtcaggacacattgaaattttctactttgactgtttggagactataaatatataagtaaaagctttgaagcttaaaaccgtgaaggtttaaaaatgaaagctctggcgatgtaagaggtggaatgttatgagcagccgctatcggctgccgtaagaagttcacgggtgacgtctcggggagtctcaaggtgacacgcctaagcttatcctgcactcacctccttccgctttccctcccccattattcccaccttggtactttttttatgaattgattcgcatgcactctcgctagctcattgtctttggcattgcatgtgttcaccctgctctccccacagtttccacccctcacccgttccatgatggctagcccaccacccgtcaccgaggaccagaaccgcccccccccggggggatttgggggggggggggnnnnnnnnnnnnnnnnnnnnnnnnnnnnnnnnnnnnnnnnnnnnnnnnnnnnnnnnnnnnnnnnnnnnnnnnnnnnnnnnnnnnnnnnnnnnnnnnnnnnnnnnnnnnnnnnnnnnnnnnnnnnnnnnnnnnnnnnnnnnnnnnnnnnnnnnnnnnnnnnnnnnnnnnnnnnnnnnnnnnnnnnnnnnnnnnnnnnnnnnnnnnnnnnnnnnnnnnnnnnnnnnnnnnnnnnnnnnnnnnnnnnnnnnnnnnnnnnnnnnnnnnnnnnnnnnnnnnnnnnnnnnnnnnnnnnnnnnnnnnnnnnnnnnnnnnnnnnnnngagcccgcctcctcgaggaggcattgggggtggtgaggcagcagtcgagtctgatgcgcaaatgcctagagactcctggaaagctcatggatgcgctcaaatgcgggtgagctcccccatgaaactccccaggcagcgacctcggaacgtgcgcaatgggttcgtatgctaaccgcttgaaatcaacttctacagatcgactcttgtttccgaattacgaacccccagtctcggtccgaaacagtattacgaattgtatatggccgtttttgatgctctgcgacacctttccgtctacctaaaggagaaccaccccgtcaaccatcttgccgacctgtacgagctcgttcagtatgccggcaatatcgtcccccgcttgtacttgatgatcaccgtaggtactgtttacatgtccgtcgaagatgcgccggtcaaggagatcatgaaggatatgatggaaatgagccgaggcgtccagcacccgatccgtggcctgttcttacgatactacctctctggccaagcacgggatcatttgcccctgggaagtggtgatggcccagagggtaacatgcaggattcgatcaactttgttttgacgaattttgtggaaatgaacaagctctgggttcggcttcagcaccagggcccctcacgagagcgggataggcgcatacaagaacgacgtgaactggagctgcttgttggtagcaacatcgttcgactcagtcagttggttgatcttgaggggtacaagtccggtattttgcaagcgcttttagaacaagtcgtacaatgccgagatgttctcgcgcaagaatatctcctggaaggtacggctcctttttttttttggaagatactcttgcttggtccatttgctaatttgatcaacagttatcacgaaggtcttcccagatgagtttcacctgcacaccctagaccttctattgtcttccatcgccagacttaacccaaacgtggatctgaagaaaatcgtcattggtcttatggaccgcttgtcttcttatgccgcaagggaagcggactcggcagtggagccagaagtacgaaaaaaaagcgaggaagaagctgtcgccaagctattgcaaaagctcgagcttgccaaagaaaccaaagccgaggagtcgaaggaaaccagcatcagcacgagcaccgatgaaacttccaaggaaaatggtaccgagaatggcgaagcagaagcacccagcgaaagccctgagcctgctgaacctccaacggaagaaaaccaggttgagtgtggggatgatgctaagcctggtattccagcagaaatcaagctgtacgatatcttctacgaccaagtggttaatttgatccgaacgcgtgcattgccgattcaagataccatggcgctgttggtatcacttgtcaatttggcattgaatacctatccagatcggttagagtacgttgaccaggtcctggactttgcgacgcaaaaaactgccgaatacaccgatcatgccgatttgcattccgcaccaacccaacaacacatcctccaccttctcaatgctcctcttaaatcatacatttcgatcttcacagccttggccttgccacattacctgccactactggcctcacagtcgtaccccacaaggagggctgttgcgggcgaggtgattcgcagtcttttgaggaacaagatcttgatatccacaccggaaaacctcgaccgtgtgctccaggcggtaagagtattgatcaaggaaggcatgcagcagtctgctggataccccgggtcacagtctcagcggcggggaggagaaaccgatgaaacggtagaagagcaagggtggcttgcgagactcgtacacttgattcaagcatcggataatgacacccagctaaaggtaagatcacttgccagatgtgttacacctataactaacagtctgtggcagcttctccaagcaacgcgcaaggcattggccgatggtaatgaacgaatccgctataccactcccgcgatcataacggcctcggtccgattggcccgcaaattgaagtcgcgcgagcattacgacgacaattggcaatcacagtcgtcggctctataccgattcatgcaccagagcatcaacaatttgtaccagcgcgtcaatccaggttgcgctgatctctcactgcgactgtttgtcatgtgtggcgagattgccgatcaaaccggatttgaggaagttagctacgagttctttgcgcaggcattcaccatctatgaagatgctattagtgactcacgcgcccagttccaggccgtctgcattatttcgggcgccctacatgggagtcgtggattctccaaggagaactatgacacactcattaccaaagctgcgctacacggaagcaaactcctcaagaagcctgatcaatgtcgtgcggtgtatctcgcaagccacctttggtgggtagttgagaaccctcaacgcgaagaagatgagcctaagggtgtaagttttatttccaactcgaattacaatatcttagtatctttcagctgacatcaattttacagctctaccgcgacggcaaacgagtcctcgagtgcctccagcgcgccctccgtgttgccgatgcgtgcatggacaccgctgtctccgtcgagctctttgtggagatcctcaaccgctatgtctactatttcgaccagcagaacgagaccgtcactaccaagtacttgaacggtctcattgaactaattcactccaacctgcagaccaacgaagacgagcaaaatactaaccttgacggcccgaagcgccacttctatcgcacgctggagtatatccgctctcgcgaatacgaaggcattgtgacagatccaccgaagtaattgccaaatggatttccagaccattttggtcaagatgcaccccccggtcatcttctagaagcactgtatgtcattgatacgtgggattcctgctttgatcctcctggaaagacttttttgtttgctcgacttcatttccttggtcatttttttgtctttctcttgttcctggaagcctgcctctttttctcttgctgctcctcggatttctttcattcctagtatatacaagtgtatcattgtctccggataacaccatacccttttcagcatgatttgtattggccatggacaacatcttttttgcctttttgtagtacaaacacgcaccagtgtagctccgtgaagttgatcaatcataatgaatatgactgaccatacctatatacctatatattcatgcgaggagccgtaccaaatttcttccggaaaatatatatccaaaaacctacccaagatgtttttttacgttgctatgttctacgcaaaaagccaacaaacgaaagccgaagaaaccttcgatcatgcaattggtcaaggacgatgacggagtgggggattaaccctatctccacggatatcgctgcataatgtagaaaggccagagactcataccgtacatgaaacaaatccggatgccgtacttcgaaaagtaaggcattcaagcattggaaaaacaccaagcaaataaacaacccatatcaatagcagtgactccttcggttagaaagatgtagacagatgtgtgattatgacgtgaatccatgacgcttcagtaaaaagggacgagaaaaaaaagaaatgaaaaagaaatagatgagggcatttcaaagtcgttccaacaagagtgcgaaaaaggaggccaagaagaatactcaaggcggattagcatcaaatcatgatcaggatagagaagtcccgaataagccagtcggaggcgaagcatactgccgcagcacagagggcccaccaaatccgccgaagggggctgggtggctgttactggggatcgggctgccgatatccccaggcacaatgctgccccgatgaccggagaccgcgctgttgggatcgggctcgaatcggacagactggccattcgggccttccttgatagaaaacgatccgccgccattctgggcactaccttccgtatcgcagatgtccagcatttcatccaaagagatcgatggctcgcctgagttgcgcaattgctccacctgaccgagaacaaggttcacatcgtggaagcttccagtaccgttctgcgggctggtcatcgtgtttaactgcttgcatgcttggatgaccaacaggcgaattgtaacgggccgagaagtgtgggaccgatgatgaacacccgctgcgaaggcattattaggaggccagccagttccagcaggggcgggtccccatgcggaagggaatggggagcccgcaaagggcgccgcactccatgtagtgttacccattggagaaccaaccgcgaagtgattttgtggggtacccagaggatccgagaacaaggacgatccttggaagctcgctcgcgttggccccggaaatgccccaggtgcgggggcaccaggcaatgattgagacaggtttgacggatatgtagcatcagtgtcatccagaagcgcactgctacctagatgagcactcaagccatccacttcccgttgcactgaagcattgccattgttctgccgatcctgtgcggagctggatgggcgtttgatagggcttggccgtgtgatggggaatggctgggtcccagactctaacggggagcggtcaaatgaaagggagggctgcctggaatgggcttttgacagaccggcttgctgcaaggggaaggccccaggcactccatggttgccagcgaagctaaggccatgtccagaatcgggtgggaacgctcggctcggcggcatggggcgtacaccgttcattccaggcggcgcaggaattccaccagatccattgaatgatcgcaaagggttcatcatgcccgcattcgacgaatacattgattctgaagggtgattcgatcgcgcagccattcctggtatgccggggggattgaacggcagacctccgaggccagcgaatgctgaaggatttgcgcgccctagaggtgacagaggggcagaaggctgcggatggtgcaaaggaggctgttgatagccttgtctggcaccgaaagacgctcctgactgcggaggacccatggaacgtggggaaatggaagaagggtgatgagaggaatcggcgctgttaggttgagagtgaggagaggatgtagaagagccatgatgagattgttgacgaggtcttgccggagtcgagaccttgggaacaataggtgtcgccataggataatgcggagactgcaggaaaccaggaggagcctgagactggatattgtatgggatgacgcctggcagagtgtgtggtggcgaggttctgatttgttcgcgctttccactccgatctcgaatttcctgctctcgtgctgcgtctcggtccttcctcgcctgctcttcacgcattttgcgctcacgctcctcttctctggttttcttttccagggcctcacgctcttccttctctttgcgtttggcttcctctcgtctcttcttctcctctttttgttctcgttgcttacgctcagcttcagcttgacgttcccgttcttctttgagtcgtcgctgcttctcggcttctttgcgagcacgctcttcctcttgtgcctttctttcggcatcacgtttcttccgttgctcttcgcgcttcaatcgctgttcttcgagtttcttatcttgcgcagccttcagagccgcctcttcggccgctttctccgcatctcggcgggccttctcctcttcttttgcttgtctttgcaaacgcttcttatctttcttcttttgcgcttcccgggcctttttagcattgcgctgttcgttcagcgtctcctcttggagtagctcatcgattagctgtttctggcgctgttcggcaaccttctctcgatatgccgtcatgactcgttgctcaaacattcgggcggcgaaaatctggaacatccgtcgcccttcctgcatgcgttgttcctcggtcatggcatcctgttaccgttattagcaaattggctcgagcaatatgagatcgtagacccgtaccatttcgtcttcgtcgaactcttcctcctcttgactatcatagtcctcatcgtcctcttcatcatcgtaatcctcatcatccaaaggaccgtgattatgcccatggaaggactgatgagcagcagctattccgtactgtgtatcttcctctctttgcattctccgttcagccaattgctccatcatatcgatgaagtgcttgccatcgtttttcagaagatcgtccgcaactgtaagaattccatctgataagaaaataattagtatccaaagttagaggtcgatctctcataatatcaatcaagtgatcttgttgcataccctttacagttagactgttgccaaatgcaaaaaaatcggcgcgggccgctcgagcttcatcatcctcaaggtcctcgtcgctgtacagctcctcatcatcgtcttcctcgtcctcgtcgtcttcttcatcatcctcttcctcttcttcgtcgtagtcctcttccaaatcatcattgttgtcttcaggtagctcctggacccggctccgtgacggatgaaactggccatgcgttctagtatgctgccctggggaccgaagaggtggttgatagagtcgagggggaggaatgatgggagctccttcgtcaaatgcgccttggttgttattcgcatattgttccagctcctcatagtatgcatcgtagaggacctccagctcttcttcaatcgcggttcgttttcttccacaaactgtacaactgcaagagtgcttttgctgttctttcattttcttcaaaacagcgtccttttccaccttgacaagctggcggcgttcttcttcgccgagctcaaaccaaaaggtcctgatattttcgcgttcttcgagagtagactggttccagatgctactatttttaataggctttccggtgaatcgactgatgtatggcatggattgaggcggaggagggtgggcgaaagtcgcggacggggtagaaagcggagttgagctacgctcagcatgattctgagattcggatcgtgctttccgagttttcttcctcttcgatgtctcacccaaggtagcgtggtggccatcggatccgttcattgtgggagatccgcgcggatgttctggtgacacatatccgtaatgaccggtgcttgctgtatggttgcgatcatcggggtaatagtcgtggtcttcatcgtaggagcgctgttcatctgttgctagcaagtccgcatctccggaggcataagcatcaggatgttccgcggctaagcgagcagcttgtttctggcgacgtttctgttttttgcgattcacagaaggcgcagaggtcacggctgatccggtcgatgtgttgccctgaggaccccgcgcgtgggtctcgccgttggttgctggaagaggagttgctgacatatgggtcgccatggtagaggtgaaataagctgcaaggactgcctcagcagcatactaataccaccagagcaagctttgagttagaaaataaggtcagagagtttggggtggtagaatggggaggaaaagcggagaacggaagagccaaagagccctaccaacaaagctccggtgattccacgatctggggttcacttaccggaattattccccttggcgtatccacgcacaaagagtaaagcgcgttctttgttgttttctgaaaatacacttccgcagtgacaaacgtgaggggtgagataggataagaacacgggagggggggtgaaaggcacggcgggtcacgacgtgtctgcgcggattagctgctggagcgcaagtaaaccagcggaggaaaacaaacaatgagtcaaagctatgattgacaaccttgggagatattaatgctgagtgagcgccgaggcaagaggtacgagagatcaaacgatgaatggatggagtgatgggctttctagccttctggctggttgtcgtgccgccgcaacgggatagccgctgcaagcgagctgatgcctgaattgtcaggttgcaatctcgaattgtatgtttgagtaacgggatcgtgcttgaaagaagatatttcaaactttccactggtagcaaagttcagagatcaactgggtcaactcttcagccaagcgatcatgccttggttacaaggttaaacagaagtcacgtctcactgctctcatactgatcactatatggtgagtcacatgataaaatctggtgtccgccttcaatctgcccgcaatatccctccacaccatggcggtgaagatgtaaatagcaaggggaaacaagtatgagcgctcgatccaccgagctgtgtgagacacggagagcgctaattaaaaatatctgccaaggtgataaacaagagagggacaaaaaaagggtccctatagggtgctgaaaccgaaaagatacccatcttttctattaatatttatgtagtcccttcatagtctcggcgtgagccttaaatctccgcttaagaggaattgtaacttccccttcatcttatcttgctcttcagcttcgacctctttcttttcaaaaaaaaaaacttccgctcactcaatttctgcccttctcctctctctttaagccccctatcatttcgaggtgacatcgcctaggcattctcgtgtctacgtcaaacccccccaatcattagcctcagccgcagcgcgaccttttccccctccccaacaatttgtcacgtcactgtttgggtgcatcttcaggccacccattcatctgctctctgtaatccctttgggcactatctgcctcgagctggtctttccttactatccatctcgccaattctcgtaatcagctgaatccgactcggaactccgcgtcatctcgctgatccacaacaccctccgctctcccattacccttgtgtatcacgaaagggttttgcaaccttcataatgtcgcaacagcaggatgataatgtgatgcgaaggtatgtgtagcccatttttaaggtggtgtcttacatccccgctgtatcgcaaggagattatgcaagccgattggaggcggccgcctagcatttcctataccattgccagtgggatggaaggcagaatagtgttcgcatatgctgacttgacgtcttactaggaagcttgtcatcattggagatggtgcatgtggaaaaaccagtttgctcagcgtctttaccctcgggtacttcccaactgtgagtttggtcctcaggcccttataagcaaggtccgtgactaatatgttcttatatgacagcattatgttagtactctcgaattcgatacattccaccccgatcacatgtctgacctctcccccgttaggtaccaacggtattcgaaaactacgtgacggattgccgtgtcgatggccgctcagttcaattggctctgtgggatacggcaggacaagaagattatgaacgcttgcgaccattagcctactcaaaagcccatgtcctcttgattgggttctctgtggatactcctgattcgttggagaatgtgaaacacaaggttcgtctcagattaattgaggaatcggtagtcatactgattttcggtatagtggatcgacgaagcaaacgagcgatgccccggagtaccgattcttttggttggattgaagaaagaccttcgtgaagacccattggcgattgaagaaatgcgcaagaaatcactcaagttcgtgacaacaaaagagggcagtgatatcgcaacgtcgattggagcccgcaaatatcttgaatgctcgtctttgacaggcgagggtgttgatgatgtattcgaagcagctacccgtgctgcattgctcacgttcgacaaacggaaatcgtcttgctgtgtggttatctgatgatgcaatttgggatgtctttctctgccagcgctcggtttttctgttgacttggaacttgattgatacaacttggtgtaaaccatgaagatatcaatcagtactccgttgtatcatgcatcactggtgtttgggaggttcttgtgttcacccagtcgattgatctgggtacgatgtctgctttccggttattttcagccgtgccttttccttgcaggtattttcttacgtctttcctttttgatcaattgtgtatttgtggctgatgcttatgcacgtgcaactccggattcccctccttctcatcgttcaattccccgaagtacattgcgatcccgctcattgtgttctctttttttatgtagtaattccggtccctttgctttcagcgctgatttctcatacattgtgctcacggcccgctcagggtaccatataatcaatttatctcctttctccctatactccttgatatagagtccgagcatatcgcacagaaaaaccataggataactcaagcaaagtctcgtagagcttgaaacgcaaaatgcatagtatatcaagataaaaaaggaaaagcatatgttacatagcgccaaaatgatacatatatcttgggccctccagtcaaatcaacatcaaatccaaccagacaacctctcctcaagacctctacttccttacaggcttcttccagtcatagttccatccatcagaaggtggagaatcggtctgcatgcgagcatactcaatagggaacatatcagtgaagatacccttcttgttcatggagacgcggaacagctttcctccgtcacccgcaccggtgcgcagctcctcgcacgcatcctgcatgctctggtactggcgcatcatctcgagttcgtgcttgcggcgctgctgagcctggaacaattgccacgcgcggtggatggtccagtgtcggaggtaacggttgcgggagaagcggaggggacggggagtgagaggatggtggaggaagtagcggatgagagctagagggttgaaaatggattgttagttttgagttctttttcttttggttggccgtgacgtgtttggtctggttgaggggctttcgggactcgggactcgggtaagagctcggcgcagggacgtgacacatactaatgcgcttatcaactacagagccgccggaggcctttctagcggccattgcgcttgttgtcgagaatggcgctgattgcagggctgctgtgactgggccgggctgttgtggttggcggttcagggtctcgtggcatgcccgggtgattgatgggcggaccggcgccatcgacattgggatcttgaagacattcgcgagggacgcgagggctggtgataaggacctcattctgatggttgtttgttgggtggaaggagtgggaaggactcgatgtaattgagttcgacggggaataattccttgacggcagaatcttgtccgccgatttagccgcgcgcttaacattcccgctacctctttagctgcaacgcatttgtgcttcatataggcatgctcttcttaaataatgatttgatttacttattgaatggctaggaatctaatttgcacaagaaagggttctacgtccgataactggtcaattaagccggtcttgataataataataggtacagatagaaatcgatacttttgagcagagatcatgacttgatatttttgtcgaataataagatagagatattcagcagtatcgagagtcatcaaaggcatcatatgtgaaatgtcccaccaaagccatcaaatagaataccataaacgccatagaatgcagtcgacgcgcgcgccgaagaaagcagaggaagtagggactcaaaatcgagaaatgggctattcaaagctatcaagtggaccgctttgcagcatggtgtttcttagctcgatcgtagttcaaaaccttgcggcgacggtgcgtttgggcgagcttccatcgacaataaagaaccagtgcatccttcaacagaacaaacatgcacccaccaacaacgctgcgaccccagcgggtctggagtagccccaggcggccaccgctcatggttggggatgtccatgacttaggtagaagacacttcaataggccacccactgatgctgagactgctgggaagacgagtgctccgagtacgacatcagcgaaattgctggtatcggcgatgatctcattatgtcggtgcccaagccctagcgggttattgttttgcgcagcatcttgtgggccgtcatcggcatcttcgtcctgctcgacggcagccccaaggtccggttcgtctccatcgcccattcccatttgcagctcaagatcgatctccatcaggatttgtccgttcccattatcaccaaaccggttgagaccctccgcctgatcttgttgctgcgcatcatccaggacttcttctgccgcgcggggttgtacctcggcaatccatttccgttccaagccaccgaatatccgttcgtaaagcgccccgtaaaagctgttgacgtatggcagcgcggcaaacgtcatagccggcgtgggtggccacaagtcaaagtccgggtcctgcccggggttatgtgaagcgaagaaaagaaccggaatagctggaagaaggccttcggcgtatcgagtgcgcgagaatattagaacgagcgggattagcggcaatccaacattcatcccgggattccacgggccctccacagtctcctccatgatctgcctggcttcctcggttccgaaaatgaggtacattgaataaacgccatgcgcgcagcacccggcccaaacagtgccagccattgtaaacattatgccgggaagaaccaatcgacctgctacgcgctcgaataatcgaagtacatcgacgacatagcttcgcgggcgagtgaccacgatttccgtcttgcactgagggcacatcattgttacaccaccgttgcttttccgcgaccgggggttttccatgtccgctagccagtcgagcaggcatgcctcgtgggctgtcaaggcacaagggcagggcgaccgccattccagattcagtggcgagtcttccgtttcatctgtgtagcaaatccagcatttgcgcggctcgtcttcctctgagacatgggggggttttgatgatgaactaagtttgctggaaatatccgattcgtggctcgaggtcgatacgctcttattcaagaaaacggtttcggtgtcctccatcgactcatcctgaggtgagacactctcttgagagatggtagtttcatcgggattggcgggggtggtatcatcgggtggtctgattctgcctggtgcagagtatcccgggacggacgccatcgtagtggggactagctatgcaagtcagggccgatgagagaagtagagagatagttgcggtaatgatctaaatcgggctcgataagagataaagaacggagttcagcatcttctgagtagagaggtgaaacatataaaagccgaaaagcaaataaatgtcttaatttgccccagagcacaagaagagagggagccccattccacttaagtggaggttggaatctcttaagttcggctgtaagccgcggctgtcaaaggcggtcacgtgggggcaatcacgtcacagacccaagctcaaaccggaaatggcaaatgatcgtcgggcgtatagatgtagatttactttctaattcacttttgagtatatatgatatactaccgttcagtgagatacaatagttcgaccattgctcttagtcctcctatattacttccttccaggttaatgacagcgctcagctctctgtgtcctaatcgtcgtcctgtgttctgaggccgtggtggacatggtgatggtgatagtagtgtttttcctggtctagttgaccgaagagcagaactagctaggcactaaattggactttggggcatgttgcagttttaatacacacccatagatatctgtgttgtgtttgcccctgcatggcaagcccatatacgaggatattgaaaagttaacctttgatttggtcgaatatggaatactactccacacagctgtctacatagaccgatggataagaaatttgaatttgaataaagtagcaaatcatcattaaaaaagcagaaagtaataaggcttgatctggcgatctggtgatcaggggtggaaaagcaacatcatagaagagcgaggggtagctaatccacacacccaactaactacagttcagggtgaatgctaccgtcagactccctctttccgtcagctgatgcagccatttcttccagggcatcatccagattagttgggactgagacagattcaggcgaccccgcgggaacagctgcaggttcagcggactttgtcacgtccatgtcgtccttgccctcctgcttatctgccgattcggttgctatgggagacgatccagccgatttcgaggtctctgctggggtctgtatagggtagacatccgctgttgtggtcctgggcgaggtcatgtcctctaaaaccggagattcaggtgttgggtctacagattcaccggcggtattcttggcaattggaggggccattgggcgttcagcagtcaccgacggttccttcactgcaacggcagacttctcttccttcttactggttccaacaacaacctttccatcctggtcgacctgccagatattcaaagcttctgtgatcttgatctctgggatagtggggagcgtgggactggttttctcgacggctggcttgcgtcgtgctggtccacgggctcttcccttacgagcatcgctgagaggctgcttctcaaccggcacctcgggctccttttcctgaggctttggctgctgcggacccagctgcagacgtgaattcagatcagtgaggaagcccgccttcatggctgcaattttgctcccgcctggacgaccaggaattgcgggcttggccttaactgcaggagcatctttcgaggcttcagcggtggttcctgcggcctgggaactgggcttagcaggacgggtagggacctgaggcttgggtctgcctggaattgatggtggttggcgcttttcggtcggtgaggtagactgaggctgtctctgcgggcgcgggggaattccaggcctggaaggtacttccggacttttcaattcttcttttgcaggctcaattgtggtcaccagctgttgactatcaggggcatcttcccaaatatctctactggggaaacgctgtttcaaagtgtcgggtcgcgcgggagtcttatccctgccgttctcgccttccaggatgagggcggccacccgatgagagtcgactttggcgttctgcatcttgcgtttggcctcttgctcgggtgtttcgaagacttcggcagagtctcgcttaggcagatctggggtggtgacggtggcctgaagctgcagactgttcggggtatcctcccagatatcctggctagggaatctgtgcttgagtgtgtcaggccttttcttgaagcgatccgcagctgacacgggtttccctttcttagcatcctcttcagggaacaacggttcatactcctcgacgtcttcaagaggtgtatacgtatcctcgcgcgagtcaaagcgggttagttggccttgcacacttgccgaccgactgttggaacgactgttggaacgactgtgggaactaggggttcgactgcggccatcatcctcgaagcttggtcgacgatcaaatgacggcgagacggcgggatgcaagtacgccgactcggggcgcacttcatcagcagccaaaattggctcatcgtcctccacggcgttctcatatgtcggctcattctcttccagcgccggggtggcggcgaatccatccggatggtgcaaaggatgcatcggatcatccacgtggatcacgccaccatcacgatgaccatgcgaactggatctacgttgatgcagtggccttgcggtagtttgcttctgcgttgcttctgaagggaaactcatctgtcgaagtggcgactcaacagtcggttggctttcgaatcgaccgtcgggagggggagaagcaatttgctgtatgtactcgtcggacgctatatatccgacctcttcttcgggggtacccacgatggatggggaagtacctagctacagttagctttcaatcggcagcacaattgcttcaaatactcaccaagaccggaaccagtctgggccgagcttcgaacaatcttgttcagatcatcgctgctcattgcccaatcgggacgcggagtgccgacaccagggccatattttccttcttccttcacgaattcatcgggatgcttttcataccaagccttctcaaacttatcgggatgctgaacaccatgtccatgcaatccatagctaccagggggcagtgaagagtcccgagcactacgagtgcggttgtggttacggctggaccgctgcgagccttgttcgaggtacgggctgggggatggtgcctggacgtcaccggcatttggatacatgggcacgcggaacccctgctcatctcccatgtgggcagagtgtcggcgctcattggatgcagttgatccggtgcgtgaaccactcgttcgggaatgcagtgaacgacttgaacgttctagttcctcgcgagcaggcgaaacaccacggcctagtcctgccgcagcagcctggcgggaatcagtccgggtgacacctcggactcttgcttccgcacttgatatcggcaacgaaggtctcggtgcatggatcttaagatcactgccaacattgcgagtctccgcaggtgtctggtgatgggtatccgacatgtttcctgggtcgagatccgcatattcaataccctcctcgccgagggacggtatcgtgacgctgggaggacgtggaggcaaatcatttgaaacggtgcgactcatgctaggaccggtccattcattgaacggcgaaggtgcatagctatcacgcatgggcgaagccgaacgatcactgcggcgattgcccgggcgcggcggtatcttgggcatttctgacgacgatgacgctgccggcggttttggagatcgggccggtcgaggaggaatgaccggagcaggttgggacatgatgaagttctgggagctgttgacaagtcagcgactgcccaaccggataccccgcgaatacgcttggccttatgcgggctcaaaacaacaatggacacacggctccaatgaattgcagggattaaggcaactactatggatatgcagcaaattgatgcaaggttctcaagaagagagagcctagccatgcgactgataagagtatacggaatgatttgcttacccggatatggtgagaattagtttgaatccaattggaatgacagtgaaaatgtgcaatgagaacagttaagaactgcacggaagtagatattgaagcaattccgaatctgagttttaggaaagagagatgatgtatgctctttctgccacgcctgacgtgctctgaccgcaagagataatgcgcgtattgtactaatacagtatcattacatgttatataagagccaactacgacgatccgttaactcaacgccccgccgatgagatcaatatagggcactttcgcttcttttgttgaggtcctataaatggcttctatctgtggtcaatattggtcttaaaataatgcctgtttctctaaaattatacctttacccgagtgaccgtctcagctcagatcaaacattgatcacatgttctttatactgtacaagatatctaaaaatcagctgaagtatcttacaagtacttattccgtagtctagaacttgatatcggacttattctttgacctttgacttctcatgataagatgatttctctgtcgttggattggctgactcgaccgaggcggtgaagtgtaatgactttccacattgcatcatcgttggctatttatacaactcgactaaccctacattgtacacttcattctaagatcaatggacattcttaacatatatgtgcactaccctaggagctttcagtctcgactctctaggtatcgctttcctttgaccttgtcatacctttaatcactaggatacaccgatctgttcaacaatgagatccactcactaaccgaaacagcgagaatacacgccacatattgatcaccagggctaaaaagaatttgcggggcaatatgacctgtgacgaaaattccaagctccatcccactatttgcgtcacgttcctgtatattattctgtctatgattcaggctagacgacggcttgtctcgtgtagcaagctggacggattgcagcctagccgggtcgcctaagtttcaagattgtcagggtgcaaattaccagatatgggatagttacatagagtgcatatacaatgtaggctgatacccaaccctaattctgccaaatacattcaatctacatctatttccatctggtcctattggtgacacttttcagggccaagcgggtatatattcacttccgtataaacgatagatttgaatttggactcttccggattcgttctttgcaatcccatccccgccaccctatctgtgggggagcgacccggggcggggttggtgcccgaatgccgtttgaagcacgattcactatccttggagtaaatatttctccgatctttaggtagaggtgaggctgacataagtatgaaataatattaggacgaacagacgttggacagtgtgggctgcttttaaacgcctgttcgcccgctccttggccctgatctatgcttcaacgcttagattccaccttctatttcagcactgcctgtccaagacgaactaggtcgttattcttaaccgtttcctgatcgaatcccttcacagccaagtctagaactgccgccgaaagctcttcccgatcaatatttgggattgtgcgcgtgaaagcgttaaggacatggaacaccgaggccagtacagatctcccaaaagtagtggaattgaccactactccgggttgagcgatacagatctcgacccccgggtactcttcaggaagcttgataaccatgagctctgtttcgcactaagaagcagatcgtctttagcataagaacagacagactcgtgcaactataactcacgcgcatgacttgatagtcacccatgatggctggccttttgatcggatctctgggtgtaccatcggcactgaagtagatgaaacggaagggtttcgcgggaccggcctcgtacatggccttgaatcccgcgagagtgcagtcttgacacacgcgcttgacctcagcaaagtcaaagctgcttgttctgaatggtgtcacagcgaccgtccttaaaggcagcacgagttagtgggcttttttttccattcttaattgccataatatcaacgagagtaggattgcgtaccatatgcaggcgtccgccccggcgaactcagccttcacatcagcagaatactccccgtagtctcgaatgacataagcttcgacgtcgggtctgttccttcttcaacttggacgggcttccgagctagtgcgataacctgggtgatctcgttgatttgcaggcattgcttaatgatctccgagcccaccagaccggttgcaccagctacaatgagcttcatggtgagagtatctcaagttcggtaaagttgtcgggtattagttacacagggacgggaatgattaatcaacgttaggagaatgcagaggttacaatttccaggggatactacttatagatcccgtcgggattcgggcccaatcccgttcggtcagtccgtcattggactctagaacctgcccatgtgggctacctatccaactctgtattagaatagcagtctgatgcgatttcaacgactccgtttatgtccagcgctcctacctgagggagcttatatttctaggtgggctgggccacggctctcttttctgctacaaaggtccctttccagcggccccgggtgctgtatgatgccgtcgttaggaaaaacagttatgcaatttcaataggtccagcggggatctggccgaagatgccacccgaccgaaattccctcaaccagcggtacggacgggcacgtacatcttacctctgacatcctgtccgttatagtcattctgatggattgactgactgatagataggcctgtgcaaggcgttcccaatctaaatgtaaatgtgtcccgagacctggtagccaaagctgtgagaggtattattgtctaaagaaaccctgcctgtgagatacatcaagtctccgacaagctgtatggaccattttactgcgttgattgcaatcgcaccattcttcgacgatttcgttgatcgcaggggacgtatagagggcggtttcgaccccgagtggtcgtatggatttggctgtaaaccaggctgctcaattagatggcatagcttatgtggcaacccttgttcgtggagaaacgagttgcatatcaaagcttatgccagtaagtaagtgggcaccgtgtccggagtctagattcacgatccccagctgcgaaaatggatccaagcccaatgccgaatgccgatctactgcatgaaatcgagggacagctggctccgggcagctggatagccaataatatatgggatttaatcaaagttgggttcgtaattgcgggccgtaccccgactcatcgggaatggcgccgatcccgacgaggctgtctcatattggagacgctcgggcggtttccaagaccaacagtcgcaatgttgggggcattgctcagcccgttctcaacaagataccgaaaccgaaaggatattgtcaagtggaaattgtggtgaagagtagggcgggtgagcagggtactgggaagtgagagctggatggactgttacaggcagccctcgctaacacaaaccgccatttgatactattagtaatcataccgcgaaaacacccggttgctatgccaaaaatcccaatcgtagtaggtatagctcttttacgttgaagggacaggggagattacaggacagcgtattaggagctaagccggaaatggcaacatgtacgtatagttacccaagtatcgcccgaatgaggagctactatgtacctaatgggtctgggcgcttttacgttagatacccaagtgtcagagttgatacctacagaaataggccatcatccacgcgcttctaaaccccgaagaatccgaagagcttccgtttcactagatctataacatacagctgaagtcatactgagtctcgtctgatattgtggcggaattgagcttggtcaaagaatacacctttgaagatagatatcggaacacctattctggcggacgcagtccacaaaaagaaaggaaaccacagatatatctgctataggaacgctcatcgactttgaaaacaaacatgtccagcgggatcatcctgaaccaaaccgaggcatacaagtacagcacaataaaaacataaaaactatttcatagcacatcccaatgcatgctgcccaaatggcattttatctctgcaccatctgcaccgagcatttcatcgtgtcgcacgaacctccattccccaggaccaatcccaaaatggatacagctggtatataacaagacaggaacggctcggtgtgaacatcataccatcagacaatcatctgtgcaactccctggccacctagggtcttgctaccaacaaactcttgcttcgtcaggcctgcgagtgcatagaaaacagacgcgatgagaaggaagacggcaccagcaatcaagctagaagccctttcggcaagactgataagttggacaccaccaaggacggcgtaaatgagggcgcgcatccagttagttgtgaagcggcggataaaggaatcgaaggtcgaggatgtgggacaaattcggaggaggaagggcacttctatgaagagaatgacgaatgccgaggcactgagacacgttaggcttcgcaatgaatcgcgagaaatgaatgcgactcacatgctgatgacactgatgataatcagaaccacgttgaatgaaaagatgttcgcaatccctagcgcaaggcaaaggataatgcatagcacacccgtcctagatcttgcgtcagaccgattcatttatatgcgcaagtgattttcgggagtgattgaagggtccaggccacctcacgaggtagcaaatggcatttgatcatttgatcaaaatgcgaaatgctctctcatgacattattcaggcttgtaaggacacggagtgttaagaggcaacgcggtagactaaccattgtccatagatgcctaagaagaccagcacggttagcaggttgagatatggtattgcagaatgtgggaacttactgaaatttcgcgatttgaactcctcagctagcgtcatggtgggctagcgaaaagaatctggggaacaagagctgaagatcacagatgggggtattcgcggatgatcagaggtgtcagagggtccggcaaagtgtacacgcggctgatccagggcggtcaaaacaaacaaaacgggcaggaacgatcgataattttcacaaggtgaaagaaagatctggggattatgacattcacttatgcagtgttgtaaatgtttctaaagcttttgataggatcatcccgaggtcgttttctacgccaagtcaaattccaccccctactaatcaccaggcagacgccaatggtcaagaccccatatagtcggtctctagggctgatatttccacttattccaacgcgtaacacattcacggtctatttttggaattctcaaagaagctggttgaataatcaatgaaatcactactcactaacatcttgaattggttgtttggttgtaacattttgcgaatctgcttctttgtatatattgcaagagaagagcactttacaaaatccgaacaacgtaagatctactccagagctggaaatatagtttgagggatatataatattgtagtcgtgtccttttattttgaaaaataacacaacatattattagaacacagtcacgaacgaatagcatttcgagtgcgatgccttaagctatcagtatgctaggtctgataggatctttatctctcagctttctgcattagctcagagtgtgaaatttgggtgaagtatcttcttcgtcaaagtcaagaccaataaattctagctatactgcgataaaatccacgacatggacggtacccggaacccagtttctactctctgcgtgtatttatgtatatagaaattgagagagatgtctagttatatcaagggagtagtcaaaggagtacgtaatgtaaaccaaacatttcgtgtccaggtgagcgatagcacgttcactctctaccatccaatcatcagttcttgtatttacctcaaagcatgtatctaaagaacggagagcgatcgcccagcgagtcgggattctcaggatactccgaaggatccatggcatcccgcttccggttaacacgctggtatgccatacgtagaatgacagctgctgtcatgcccacgacaacgaatgcaagttcaagagagtgaccaaggatgtaattcggcgcatcttgagcacggtagaagtttgaggacatagctgttgagtgaagagtattagtttgtttgtcaaactcccaattgatgcgcgatccttacctcctgccaggttgcctactccgatgtaaatagccatgccggcagcacgcttgtagtcgcctgccatattcacactgagccatgtgacgtttccggggaatgctggataaattccttttgttgtgttagctggaggataagtgtgcggaggtttgtaaattcttaccgacaaccgccaggaaaataccaaagtacataacacctgggactccccgaccagtagacgcgagacagatgataaagccgataccaatcatgcccataaagaagagaatgaatggggatcgctgcttgcgcctgtctgatacccaggctgcaataacagcgataaccgctgcagtgatataaattggtacctaacataatgatgtcaatctccgcttcattatgaagtagctcagggaccttactgtaaggagctgggcagttgaagccttatagcctaggtccttgatgattgaaggaaggaaaagggaaatgccgtatagcggacaagtgataccccagtacactttccacgaatcagtgaataatacattgaatagccgaggacgaacagaacttaccgaatagacccaaccaaatttgccagtcggtgaaagcatcgatgacatagcgcatttcgaacttatcattcgtttgatcaatttcgcgggaatctgccgagttttgaattcgcaaactgtggatcacaaatcgacgctcttcttcagtcaaaaaagtggcagtttccggggagtcgtgaatcgcaaatggggctatgagtgccacaataactgtaagaagaccttcaagaatgaaaatccatctccagccagcgtatccgccgacaccatccattttctaggaatttcgagacacattagtgaaaagaatttcattgctgtcagcaaggagaatacatacagcgatagcgtatgcaagaagcccagagaatgcacccgcaacactggcggcactaaagaagagagcttgtctaaactgtgctcgatggcgtggataccagagtgtaatgtagtatgctacaccgggatacaatccggcttctatctcgtttcattgcaatcattagtcttgactagaacaaggtggaggttggaaggagggtagacatcaacatacctgcaatgcccaaaaataatcgagctgcgagtagtccaccgtaatctttgacgactcccatcaaggtctgtgtaacatctcattaaatgctgtttgcgatcacccagaaattatgtgcgcacttaccataacaattccccaagcgaccatgatcaaggggagccatctcgatggtcttaacttctttagaagtaggttgctaggaagttcgaaaacgcagtaggtgaagaagaagacggtcactacccacaatcatatgtcaattggccattcttccttgaaatcaaatagccaaaggggttcatcatacaagtccaattgtattgcggtcccgtcatacggagatcgtcaacaagcccctctatctttgcatttccgatattcccacggtccaagaaggccagcagatatagcatgctcagcatgggaatgagacggatgtccatcttccggaggatagccttttcatcaaccccctcaaaggtcggtgagccgaggctggatgactccgcatctgtgacaagtccatcttgcttgagatcggcgctgaatagggagtcttgggtgggtgtatcctcgaagtgttgtggaggggtcttctccggagtgttctttgaatcagccatggtgaacaaagagagatgagagaagagggaaatcaaccagcgcgggacatcgttttccgagtatttatacctatcctgaataagcttagcctaacccggggtaagtccgaaaactggggatatcccttggcatgaggggtaccacatcgggataacacattggggtacttccttggcggttgaccggcctcgacgattcatttgaccccgaaaggaatgttgagcggcgagtctattgattctgggaacttttactagaggtttaatatctcacatagtgggttatatcaaaaaggactacggagtacctatgtggggagtacccgatatgcggggggacacggtccacccatcgtgacttgcggcacaacttgcggcacttaaatactgtaatgaccatactgtagcacagtctgcttcctatgtcgactgacagtataaacagccttatctggggctttgggttgtatccataatccaatgttaaggcagaggccctctcccagatccaccacgatttccaaggttcaaagtcagatcatttttatcaatccatggatatacatcaactggcttaaattgagtgccaacatgctaccagcgacgcaatactacttatgcgaagcccgtcctacccaaaggagggagactaccgagacgttatggatatctcaattgattcccataaagcactgtgttctaattgagatacgctaacatgtgccctagaaaacaggagcgatatcgacgcaacaactccagcaatctggttgagcagcaggtgtagtgcaacccaaagtaatattaccaaattccctatgtgtgtaccattccagaagagggctggtaaaaacgactggaccacatacactcgcgtttggagggttctgcggatggttggtgagtgtggcaattagtcgcgatgaaggggaacaattgtggaactggacacatacataccacgactgtagacgagcataggagagcagccggccagcagccctgggtacagagcttgtaattcgcgcccgaagaaataggaatgaatgcgggaatcacgaagctttcgagagtattgtttgtgggtagggcttgggtttttagaaagagcaaggctaggaccgatgagatggtgagttgcattgtgttttgggaaggtgagggtctcttcgtacaagccaatctcaatacaagcgtggggttcaaagattgggaacggaatctaaggagcagcttgcggttcttatttatagccaagtctagccgttgtgctgccgttgtgctaccggattatgcttgttcaacctggactcatgaagaaccaattgaggcattggatcgctcgagaaatcctaaatgatgttcttactagccaatgttccaatctcatcctgccaatacaattaattatagtaaacaatatcctaatactcatcagatagaggctcgaccttacagtatcgagggcacttagccatatttgcccctagagttatatcatcatagcatagcaccacaacctcttcctcgaccagattggccacagttactatcactcaagaccatatcattcaaggtcacctcccatttacaacaccgccaatttccaaagcacaatggcaccaggcccgtcgaccaaacccgacacaagtacacaatgggacgacgcatcgccaatatgtggatagccgccggcttccccgtaatcctatgcgagaaagcgggcaactacagcagcgcagtgcgctacattgaggaacacaaggcgaacaagccgctgaactaggcacgcaccccgctaagttggaaacaacatcctccctaccagaagccgtcaaagacgcatggatggtcgccgaagctatcccggagaacctggacatgaaaatcgcgattatgacagagctggataaaaacgccccaccggactgcataatcgccagcaactcgtcatcgctgcggagccgtcagatatcatcaataccaagaataattaccgcatctgcaatggtcactattacatgccgccggaccagctgtgctacgaggtcatgtcgtgtggctacacggatcccgagatctttccgtttttgatggagaagctgcccaggctgggctcaagcctgtgcatgctaaggttgagtctactggactggtgtttaatcgtatttgagcgtcgcttaagcgggaaatttgccttgtcctggctgacggcgccagtgatgctcataccgttgatgacatgttcaagagttggttcaacgctaccaagggtccttgcgaaatgatggataccgtgtacaatattgaggctgtctatagtcaacagcgtgatctggatagcactgccacggattggctgaagaagaattatgttggtaagggaaatttgggtgccaaagctggaacgggtttacttggataaatagagatcattatcgactaattttcattttgcaagataaaagataaaagtgttttagaatagaccattgaaactgcagttctgagagttatgacgagacaccaactggaactaatgatttattgggtataagatataactgcactctcgattccgggagtatataggaacgacccacgtcgcctcagacagtccattacagcatgacaatgaactgcagatcttcgacgacagactatgaaacacgattcggaccaaataggcgacggtgacaagggagaagatgaccctcggagccaagtcgccagagtgatgtacaagaggtaaagataaaacgaaacgaccaaaataaagtaaaatagggcatgagggtaggtatcgggggtccaaggaaaaccggccagggaatcaacggtcatcagaagtattaatatgcaggagacataatgataaaaattaggcaaggaacgtagtaaagtgagggggcaatcagaatagcacgacggcaacagataagtgtgctctgaaacctcagaggaaagggtatagagtgaagggcattaggagcaggccccagggtgtgacttgcaatcattagggtgtagcacaggcatagggccatcagcgcagagggaggggttgagcagtgaagaaacagccaaactaggttaaagacaatcgcgcgggcgaaaccttgaccaaagaaacaataattaaggggattttctgcgatgatggactttccactctgctttagcgacacgcataaacaattcagtgtctttgatgggaacccagctggtgaggactttcatgatattctcaaagtcggactcgagaatgatgtcacgcatgccatcaataagggcagcagatgaagcatgcaagacgtcaaggccttggccaaatgtccttacgttatcattagtggggactttgttcttcgatccggaggatacggagcggccagtgttgtcttcggcatcaccaaggagcatgaagacatcccacacccgaagttgagctgggaaggggatcgagtaattgaaaagtgtgaggtaccagcgagtgccgtaggctgtgggtgggattccgacctcgttctgaaaaattaagcgttagtagacactcctcgtgtttcgagcgagattgacttaccagtttcgtggccacttcacctccggcgagccactctcgttcaaagtcggccaaggcctccattagtccagcaaagccggatttgtacagctcttccagacctcgcagctgccacaatctgacgagcataataaaagaatgctcctcatcgtaatatgctagtaacgtagccgcgagagttgccattccctgtacgtagccagtgtcagggaaatatagtgacatggcgtgaaggacacggaacaatagtctttggccaccccgatagcgcctccgaaacattatatggctggagatagttcgcggtacatcgatatcaatctggacatcgtccggtgatgagatgaactggagttcattgaaggcttcgatgagctcgtccgcaggtgcgctgcctttgtggcgccgggcactggcttcaaggaatgagtaccaggccgttgaccgccaccgatctggaatgcctttccaagttcgctcgattaactttgagctctgagtatcgaactcaaaggtcataccgccgccgtccttggtcttcttagtcggcttagccatcttggtccatttgtcctcacgtcgccactccttccttcgcatcgcgcgagtaagtggtgcaccttccttctcaccagatggagtgggtagagtgagcatgtcagccgcctcatctttggcttttcggtctcggttgtgaggcaaatgattggtagcggcacgcatacgagatgtcgagcggcgcaatggcggaccatagttgctctgtgatgaagatggacgcgcactcatagaagtttgggatattttgcggactagagacgcaccattgaaagaacggttactggctggagcggttggtggacgaattgaacgtttccggcgaggtgtctcagaagctaacagaaggctagttgtaactcgctggagcgggtttatatcggaacccttggagttctttgcagggcgaatgaagccataacgatcgacttcttctgcaccgacattttgccaatattcagcaccacctgctagctcctgtgtttccctcttaattcgcatacgctccacttcgccagacgtccttggtttgagttcattcccagcctcatccgtctgagcagagtgtgtttcagaggtttcagtatccgggaccgcaccctcttcccacaagactccgttctctgaggccattgctctcgcaacctcggagtcggtaacattttcttcgcccttctcatacatcagcctaactcgccgtgacaacatatcttcgtcagccgagattgctctgctgggaagactagtctgtctcgggcgaagagtgccttgaggtttgacgtgccgtggaactgctttcggtgctccgttctctccttctggcttgctcatggtaatggcagggggtggcgcactttcagatgtctgtcgatccaactgtggatcgcaatccacatccgatatttcctgggctggtcggcctaattcttgacagggtttctgaagaggctcctcttcttctagatttttgtggggcgagtctggttgttcgggctgctcttccagcttctcctggggtgtttttgggcgcggacgtttcgcatcactcttgatcagacttccacgattggaaaactttagcgacttatccagaccacccaaagaggccgtcggtatttctaagggaataccagcgaaagggtgctcgatttgaggcactggcggagcctcttccaagctaagtctcctctccatctcgagtgaccgtttccttaaaccaccccactttctttctgaccatcgagagcctggcctcgagcctggcctcgagcccggccgtgagctaggacggaagtttggttcattcaccagaatgctaggcacgctgcgcaaggagggcgcgccctccgaccgaatcgttcgagtttcgtcaccaacggacacggatggtgcgagccgggagaacatgagcacggatgcacgatcattactcggaccggctgacgcggcgctcgtgcttaaagatcggccattggaggctattggcgcatcggctgtgggcaacgagcccgaccggattgcaagaggggcgtcaacggtattttcaaagggcacggcgtgaatcgtcggattggactccgatcgatcgtgcgataacgatacagaaacctcattcaccattatcccggcatgacttgcgaatctgcgcgtgggctagaatcgcgtgaaagaaaggagtgtagggacgaggcgaaaggggtggaggccagattaagcgaaaatggggatcaaagtagaaaggagcgacaaggggaaaatcacaaaggaagttcagtagaacagaatctccagaattaaaattgagagatacctggaggcgtggagttattttgggtcggtcttggcgctctccaggtcagttctggccttcaacggggcatcttcggagtttccgtcatctcctggctacatgtaacacgtatatctatgtaaatagtatacgtatacgtgttcaaaatatctatgtagcctgactatctccctaccatcctatgagggattctcaacgtccctcttctccctcatttctccctcaaaatagatatcaaggggtttgtcccacctctatgggccgtgtgtggatcgtgagagaacaaggagtgtaagtggagtacgctagttcgactccgtaagttgcttacattagaatgcccaacggtgggatgtgacatgaagaggtaagctgtttaattgtatccgcgtatacccaactatggagtacatggaacaacacagagtatgttgtagatgctgttgaaaccctcaattccccaatacgccccagatgtacaaaacacgtggaactcctgtagccgaggcttggacaaccggccgttagctgtcaatgctcaatgtagtcaaaaggggaaaatacccccagctagaaccaacgtaaaaaaaagtatcatgagggcgtgaaacggtcaatgcagtgacccagtgttaaatgcagctcaactcatagctgctgacccgatggcgagtcgcgatttggtcgagtccgatccacaggctctttaggcaagagttcgatctgacggaccaggaagctcttctcatccataaattgatcgtcgtcagttcggtcctccaagaacttaggcaaaaacctcaacagtcgatcacggttattgatcagaattcgttgcactgccaccgatttggtcggattggcaacaaacacctagtcccttatcagagcaagccctcgtctgttttcggagccatttgagggcaaccttaccttgaacacatgaaacccttcgtattgtaccatcttgcgatcgtcccgtagcagtttcatgcagagcttgagattatctccactctccacgtatgccatcatcacgttgtagttcgcacggtccaataggatctcccccagaagtttgatgctttgacgcttggtcacatacgagtccgagtggaccaggatgttattaaaccgcccgaaaaatagttcaaaattggctgcgaggtacgaggtcacgaggctcttatggtgggtcaaaatctcctgtagaagatatgccagtcagtcacttattatcaaccttggaataggataggtatcgttctggaaattaccctgaatgtcgtgaacgcatctgcgctgacttcgaaattgctcttgtcgatccaatcaaaaaatctccagaacacaccatctcctctctgcggctggttgggcttcacgtcggatagtcgtatggccggctctccttcattggattgatcatacaaaacaatcgcagtgatgacatcgaatttcaatgcctctcggagaatgacaccacatggcattgcactttgactctgcatgtagccccggcataactcgacgatgatttctggtcgatggtggacaaggtatgaaatgacgggaggatctttttcggcggcatatgaattaggtcggaaccgaagtatatgggagaacacggtctgggtgtcttttctggcttcgaagggaagtaaatggatgctttgggctagatcaaagagtagatcttcctgaagggttgcttgtacgagtgcatggacttgatccacagacgcggcgacctctaaaacagaagattgttgggttaattttacattgctcgttaggtgctacttccaggatacccacctggtgttccttggactatcaccttcatttgactgagttgcttagccagctcctcttcggcctagttcattcattagtcgattgttctccccagctggatgtctccaaacgaaccttgggagcattctgggagtcatggatcctcagtaatagctccttggttgtccggacgatatcagcaggttgccgagaccggccgcgattgaaaaagaaagccatggtgagatgggaagaatatgcggcaaatttagaaagaaactggagatgaatgcgacatgggataagttatgattgcaacggaagaatcaagatcgagtccaaggggaagcaaatgtgatgtattcgattgcaagttgcccaggtgcgaataaacaaaccggcggggcaacggggaacttaccgcctaggcacacgccgataacgtttttttttttttttacgataaggttgacacagaaatatgatcatgatacatagcttgatagccaaatccttgagagcttgtacataaacatgtcgtgaccctcacaacacttcatactccggtttcattctttccaccatggaacctgaacttacaaaaaatgtcagaaactctgaacatgacgagccgtgagtctttctttcacttcgacattaataccattttgccatttataagggtattcaagaacttacaagccctaattcaaatacgcctgttctctctatcgagatagcacctagtatcactgtctcccttaattgccccttgggtatcctcgttacagttcaccgagaggaagatggcatcaataagccctgcatttcccgctgggacgtgcactgtgacgcatggggtcctttgggctttatgctcttcagacatacaccacaaggtctgaaaaatatcgaaggaaatcaccgttccgagactttggagtatacagaatgggatgggcattttgataggcttctccctggccaatgtctccgaaggaacttagtgacctcctcccagtttgcaatcagctgatcccatgtgagaaataagagctgctctaaccaggcgctgaatatgctcttggtcgagtttgttgtcgttgacaacacataagattcctagcataggcttactgcttgctatcttatttcccgatcaagagatctattctgtagtatactccgtagttataatcttaaaaccactagttactccgtacaacttaactaacaagtgaggctaactgaccgattatcatatcacgtgttttagtggatcaccggtcatccatggatgggtcccataggtcagatcaaatgtcgtctccgctttttttttctgtatcaaaatgatctctgcccctccccctccaaggttgaaacaatttgttattgtcttataattcatgtcagcctctaatatcgtgaacccacccgtgggtgagagtttccctgactcccagtcagtatcggattcgtccgattccagcaacgaggagggctgggaagatgtcgaacccgatgaggagtcgcagcctgtggttggccttttcactagccaggtcttccccgatgcgcgctcaatgctgaaggagtgcaaggaaaagtacaatttcgatctgctgaagattcagaaggaccttggtatttccggcttctactcttgcgggattcaacaattgaggctaacttctttttcccgcttttagatttggatttcctcgacaacatcaagttggtcaactacgtccgtactgaagtcaagaacggaaacaaaaaccctgatgtctcttccaagtccaaattcgaggatgaggtctatctcaagcccgttttggaggatgacgctctcttgtatagcttggacgaccttaccgaagagcaggtcgaacatgctgtccccgccaccgagacaaaccgacaggttctcgaactccaggagaacttggagcgattgcagacccaattctccgagtaccgtcttgctgtgcagaagtcgatggatgaccaattgtcgaaagaggatgataagcttgcagaatccaaccctctgccctcagctaaggctgtcgacagactgcaggatgctgaagatggatatttcgtatcttacgcttacaacggtagggtttctcgttgaaccttcgatgcatataatactaacatagtccaaaggcattcatgaatctatgctcaaggacaccatccgtaccgactcttaccgcgatttcgtctacgaaaacaagcacgttttcaaggacaaggttgttcttgatgttggctgtggcactggtattttgtccatgttctgtgccaaggctggcgcaaagaaggtcattgctgtggacaactcgaacatcattgaccgagctaaggaaatcgttcatgacaatggccttgaagatgtgatcacgtagggctcataatcatcccgcaatgaagagacagtactaactcatattaggtgtatccgtggaaagatcgaagaagttactttgcccgtcgaaaaggttgacatcatcatctctgaatggatgggctatggtcttctttttgaagccatgtttgattccgtcatctacgccagagatcgttatctcgcccccgatggtcttatggctccttcgcatgctaccctgcgccttgctccctatgccgacccggatttcatcgcgtcgcacatatccttctggaacaatgtctatggtttcaagatggacagcatgcttcacaaaatctatgatgaggctgtggtccgcagcaaccagcccacgactattgtcggagagtctcagattttcttgactcttccgctgcacaccatcactgtcgaggagctgtcgttcctgaaggaattcaaggtcacattgaaccaggatattgatgccttggatggatgggctatctggttcgacatcttcttcatgccctccagagagtccgttctacctgagaatgccatcccctcagatatgcaaaagaagggaattgtctcgttcaccactggtcctgatggaaccgagacccattggcagcagactgtccttctcattgaccatgccaaggatcatggtaaacaaggttcccaggccttgaagaagggccagctcatcaccggcaaaattggttacgagaagacggagaagggctctcgaggagtggacatcagtgttcagtgggagtccgatgcaaatgagaagggggtccaactatggagccttgtataggatcgactgatcttttgatacgttttctgatgaactaaaagagatatgaccacctacatagaaaaggacggccctattatctaggtgtcgtttatttgacctagtgaatacaaaatgattcagatttaggaacaagcaatgtaatgggtatctttgtcgtaattcaggtcatgatctcgtataaaaaatagaacatctaggattgattcttcgcttcggggatttcccgcctagcagtctcaggacgtttatcgtgacgatgactatgactgcgatgagaggagtggtgatgagagcgacgatgagagcgatggtgtgagcgatctcgacttgaatcttgacggcgacgatgatgtctgtcagaacttcttctgttcttctcacgttctctgtctggcgcatccaatttgaacccatcgaggctgttcactgacggggatcgccttcgccgatggcttgactgccgtgcctcttcggatttcaaaatttcgatttctcttcgcttttcgtcattccatcgcttccgttcctgctctgttgttttcaactgacgcacaccccgctttatggctgcgagtgggtcattcgcactcatacgagcctgtgtcctctctttgcgccttggatcctcgttaccccacacatctttctcgggcattgaccctggcgctgttacatcttgttccgtagaggaataccacggtttctgaccaatagtctccttgaagcctgcggcgttggaaaacctcattgtgtattggtcttcatagctgcgtttcttgcgtgccgcttcagcctccgcttcgatatttttttcagttttcgcacttgtggctgggaaaagattgatatggccggctttgtctagaatcggtgcttgtgctgcgtcagccttgcgagaggcgagcatcaactcttcctgcttagcaactgcttgtgccgcatcctcccgagcgtagcgtatatctcgatccgtgtcatcttccccagcaactcgccttctcttacgaaatcctccagcatcgctggtggactttctgtctgaccgagccccgggttcagatgacagatgggagggcgccggtggaggtgtaggcggccgttcgccgcgaagaattttgatcctgcgttcggcatcgacctcctgcatgatgcgttcatcttcttcctcgcgggcttttgcttgcgcctcgtcgcgcctgacgcgcgcgacattatcgacattgtaaacgttccatgactttttgccgaggagatggctatgagataattagccgctttcgcaaatatcataaaatcgaaagaaaatatccacttacagaggcatcttgcaaattggctgactgttgtatggacgcgctcgatagcaaagagctggtcttatcgataatgacgtccccacgggccgacgctgttcccggtggccaaagtggccccgtctacagctctacggttccaaccctcttctcttcccttcatgattaatttgctttggatatcagcatatatccagtaaattcttggacatcacattctgagaattaatcctaggtcatccgcgctgcagagccgactgacttatagttgcctgctcctttgtcgacactgtcgctaaagcaatagtttcaacggttctccggtcaacctctctgattagcgacaatcaaacggtttatcatgttcaatcgcggcaatatcccaaatccgttcagttccagcggacaatcgtccccgcagggtcactcgcaccccaaccaagcacccccacggtatgatatcgaccgctccccctcaggctatgcgactcctatccgcgataacgatgtgccgatggctaatatatataattatttaagcagttacggaggccaacctccaccaggaggaagacccgcgccgcagatgcctcctaggatgcagtccggacaaagaggtgggggccagacttggactcttcatcccagcaagagtccgaacgaaaactacacatttggaaacctgtgagtataatctagctgctttgtcttctcggagactgatacacaatagcgttgctgtttcgccgcaggacatcccaccctcacgagatggcaccgacgtcctcctccttatcaatgacctcttcgtcttctctgctcgccctctcgatggtttccctcccggttttatgagcatgtcggatcctcagcgaacatgggccaacattggattgagggatgcgatcaaggtacaattgtacgatccgtttagccaaggcggacaggcctacctgggctccgcggatattgaagtcagcttcgcatctaccaagaagagagttgaagcaccttatgaccaggatgaattggcacaggcggtgatcagggttagtcaacttcgtctcagccacgaatgtatgctaatagaacctagaactttgagaaccaattattctcacctggccagagaattctgatggataataagagtatcccactcttactgcaggtcaagaccgttcagcgggttgatttgacatcagagaaggccgatctcagttctggacaagtcgaaaccgatccttcagccagaggtattctcacacggcacacccaactcaactttttcaaggatacccagactggtattaacgtgaagccatctaatcgccgcccggcggctaactctatcatccaaccgggcttcaagttccaggatatgggtatcggtggtttagactccgagttcagtacgatcttccgtcgtgcttttgcgtctcgcattttcccccctggtctggttgagaaacttggtattcagcacgttaagggcctgttactttatggacctccaggaacgggtaaaaccctcatcgctcggcaaatcggaaagatgcttaatgcgagagagcccaagattatcaacggtccagaagttctcaacaagtacgtgggtcagtcggaagaaaacatccgaaaattgttcgcggatgccgagaaggagtataaagaaaagggcgacgagagtggtctccatatcatcatcttcgatgagctggatgcagtttgcaagcagcgtggtagcggcgctggcggtggcaccggtgtcggcgacagcgtggtcaaccagctgctttcaaaactcgatggtgtcgaccaactgaacaacatcttgttgattggtatgaccaatcgaatggacatgattgacgaagctttgctgcgtcccggccgtttggaggtgcacatggaaatctcgctcccagatgagcatggccgaagccagattctcaacattcacaccgagaagatgcgaaagaataacgtcatggataaggatgttgacttggccgagcttgctcacttgaccaagaacttttctggtgctgagatcgcaggtttggtcaaatccgcctcgtcctttgctttctcccgccacgtcaaagtcggcactatggctagtatcaacgaggacgtggtagacatgaaggtcaaccgatccgacttcctccactctcttgatgaagtcaagcctgcatttggtgtgtccgaggaagagctgtccagccgcattccatacggcattatccattattctgcgactatcagcgaaatcctgcgggaaggcgagttattcgtcaaacaggttggagtggctgagtcaactccacttttctctgtactgcttcacggtcctcctagcagcggcaaaactgctctagcagcacagattgctattgactccggcttccccttcatcaagttgatcagccccgaagacatggttggtttcagtgagccagcaaagatctcacatatcagccgaatcttcgacagcgcctacaagagtaccacaagtattgttgtcatcgacaacatcgaacgaatcatcgactgggtgccgattggtcctcgcttcagtaacagtgtgctgcaagccatcatggttttcctgaggaagcagccaactcacggacgtcgtctgttggttttggctacgacaactgagcgtgcgttgatgaagcagctggacatctacaactccttcaactcggatattatggttcccaatgttagttcctttggtgaactacggtttgtcatggagaaatcgggtgcatttgatgctcgggagattgcgcaagccctcgagtcagttggtggacttgcggatgacgggcgcttgagtgtcggcatcaagaaggtcctcttgggcattgaaacggccaaacaggattcggacaaggtcggccgctttgttcgtgttatcaaccgcgctattgaggaggaacagagcttccagtaaacactgtttataacgggctttctattactgagtattagaattaaaatagttctgaagtatatatctgtttacaatcctagtttttcttttgttggtatcttcaaagttcatctctaggcaagccaccaggctagaatccgagaacttatcaaacgccaaatgaccccattcagactgacataacgttatctcagaactgtttgataaattctttctttcattttgacgttatgtttatccaatggccgagccttgctagtttgtcatgttgactacttgtaaacaacccacgcaaagaaggttctatttatataaatcaacacgtcaagtgttcgaacttcctatgaatttcagccttgatttggctcgtatcggactgtaagtgacaaccgttttggtgtgtcaggccaagatatatcggccgtcaatgtcaatctcgcagttacacaataacataccatacaatgatcagtggtgccctatgctctagttacagtcctagagggaatcaggcacacttcaacgcctgatattacaggtttacaggcagcaattcctagaccataccgaaaaacacgtaaaaccaataccatttagaggcactgctcgactatacttcaagatacgcaaattcctagccagcatttacacaaagacctaagcaaaagagcaaaagcgcgccaaaccaaacaaagaagcaaaaaaaaaacataagaaatccatccttcatcccaagatcgcaatttttgttcatcaagggggttgccctttcatatcagtcatcaacaagcaaagtgcagcccaatctgagcccaatcaatagccatcatgagcaaacttcttcgaagagcggcggtactcatcaggatgggccttctcggccttagctttcagggcactatttccagccacgtgtgtcagccttctagaaactcactcatcggcgctaatgccgcaggcacggcgctgatcgacaggcacatgccaagctcacccagcggagcggaagcccctgtcgcggagcggagcggaacttgcacgtccatcgcaccacaatgcctggttttaggggtgaatttgcttacctgacacgcttttgcgtccattccaggtcgcgctttgtctctcttgcggttttaaggccttcggagaaatttgctcgtgcgccttttagtcgtcgttgggcgagcgcttgtagctccagcagttcttgctgttttgcgttcagctggccagatctgcaagtgaatttcgctgttagcttcgtgtttgaagatcttgggatatcttcctgggtcttgttttgtgaagcacaatctctaggtggtggtgatcgctgcggggaggaattgcaaatgctgatagtgttgcatggaaactcacgtctgcgcctgtcgtgccagacccttgtccaatggtgttggatcaaatgcatcctgcatgcggtcgcttaggacatccacgacatcgacaccggagtacgatgcaaagctggagtcgtactcgccagcagagctgaaggtgagcccaccagaggaacgactgccggcggtggtgcttgcatcagagaagtctggtggggagctagagaccctggaaatggggtagagagaagctggtgccggtgccttggagggtgcatggtggtatgggtaggcagcaggctggtaatagtgacgctgggtggccatgacgacgattgactgcaacaacagcaagtgttataatggaagaaagaggaagtatgaagctcaagtggacttcaatgagataagaagaagcaagaagatgggaagaatgtggaagaatgtgtaaacaggcctaactaggagtgatggtaaaggaagaagaaagaaggactgtctccccgggtcagacgagggattttataatcctccgcggggagtcttctgtccggcggatgctcccattctatcggatgcgaatgtgatgacaaggattgcgcaagcctcgaaggagccattggaccactcgggacacattgactcgcacccctccctctgtacctccaatccgagctccgcctgcacgtatgtctccgtatctgcccgcctatttgcctcttggaccgccttgaccccgctcagagtggaaaaaagactcaatgtgtctgggcgaggacgccagccttcctgcattagggtttccaccgttgagtggcggcttggtgcaaaataggtctcgatctacgcccctcttcctggtttcaaatttcgggccaaagcgcggactaggactattcagcaattgactagaaagggcgttcgatgaggttgggatgggtggagttggtggaaaggtgagatataaatatgaccttcgccgtcattcctactcccactttttctcgactcttttttctcttgatttctcacaattatccttttcccttcccgctctcatccccgttgaattgattttttcttcagaaattcgggggctgggaagaggacgatgaatgttgattcgttcgaacaaagtcaaagataagacggactacacaggagccggtatgacatatttctccattcaactgtcaaagtctaacatgatagttagttcatcggcttcctatacatatacacatgttgtagttgtataattgtggttgaatacgcgcttccgcgaaaaccaaagagattcacgggatgtctcgcggccttacatcgtcgttgggatcggagcccaagagcccgaaagtaagatcgctgcattcaattcaagtcacacggagaatgttggacatcactgcatgaataacaggaccgtgaggaatattggcattcgaaactgctcccgactcggtgaccctatgcttcttttggaaggttctaacaagaatcatcctagcaatatatgagcaaaaagggaaaaccgtgtgaccaatgcgcaacaagtccaggtccaatgacaagaggaaaaagaaaaatacacaaggtgaacgttgatccttcctccgttttgcccgcctggatgcggctgttatttctgcacccgacgagaaagacccccctctcgcacgaatccaccaatagccattagagccttcgacagcaggcaggacagagggaatcatcgctgcatcgagaagcgctctagacgcccatcaacgtgggaagagcacgcagctgctccccactctatgcatatagtcgatgacttgcttgacaatagctatggggcatgtatgataaagggaagccatccggcaagccccgtccgaaatactatatttcgagagatgctgtgccgcctatgaccgttcatcattggtcccagataattgctgacatcaagacgacgcagtgcctaactaggtgggaaggaaatgggactgcaaggcatacccttccaggtgggtgttctacactgaaactggatcttccttgcgcactctaaatctgcttgttctcttttttcccgcccgttgatgcctcactatgcctaaaagccagcctgcatgccttacagcctgacgattcacgatatgccccgtcgaccgaggaaccctgtgacaccaccgtcctcaatcgatcaaaaccatggcttggtgaatatcgcagggatgccattcgtctctgctgaaaatggccgagcccgatctcttattcggctaggccaacatcgggcagcacggcaattaatgacgcacagtacacacttcggcaatacgcctctttttgtctgatcttgctcttcgtcatagtcttcccaccaacttcgtcctgatcagcccccccttcaactcggactccggacccaaaggtatattcttttgaaccttccaatgttaatactccggataggtacgatgtcaactgattttccttgcgtcggttacacaagcccgctgttttgatccgaatgtgttgaggggaatcccattcgtgcctgtttttattgaccatggcgttcaattaaagtcctttttgcctattagccgggtgtcgacaattcttctactaaatccaatccgaatccaacaagtttattattttttcagcgcacaagtggggggttgcggggattttctacttccttcaccgccacatgcgccatggccaactcactcttacccttttcgggaagtatctatcactctgtgcctaccgagtactccgtacatatatgtactgtactatcatcgggatgatggcaaaaataatgttcaaaggattggaatctaggcgcatccctcggtgtttacttcgttgaatgtatgctaaatcaaacaaaacaaggattgtcattttctcgaaaacactaggctctagaatagctcatattttcagggatataggagcatctcacattgaatcttctaagagtatacatactagattcaggtacaaggcctctcagcgggtttaaatacaaccactatatcgacgtgatggaaagttcataaagatttttagtgatgtttcctccgtagtcctcaacgatatagcgcgtaatcagaatttccagttgtagaagtgctcaataagttgaaaatccacaattaaccttggaaatggccaattttctgctggcaataaaagccaagagaactaaagcccccagtcgttatgcactgcgagacctaatggccaccacagcgtctgtattggggtgatatattcgtacattcccagtgattgtctttgtttacagttctcgttattaccacactcgagtgtcattagtagtagcagtagcatttctgacaattttcaagattgttggccagctgtacatggctatgtatacaatctaagtcttgctactactagtaccttctcgcaagtcgagtgcttcgcttcagtattggttcgatgctgtagagcttaaaattatcatttgatacttcagaaaacgcttaagttcggagtggagacataatctaaggatatgtgttgagacccttcccgccttagattgataggactccctaccttgtttggtcttattcttctctttatctcagccagccaacacaatacaacccatcgtttcctttcccatcaatgtttgggtagatctattgtggacgtgggcattcaatcacgtcattgttccattgtaagataactagttgcaccagatgtggctttgataatatttggggaattgttgctccccctccctgaatttctagtaccgccttcctgatttggttgagtacttgctcgacacttgcttctgcctaccgctgtcctcaccgcctcttaatttgtacaccgcctttgtatggaaatgcatatgatagtagcaacaggcttggacagcaggtatctatagcatgtattgaagagggaaataaacgatgggcagcctggctatgcaggcaagatgaaaacgacataacaccaccaaccatccgggaggggtcagctagcaagcatagggaccacatagaccacaccatagtatacaatctcctagtacacaaacatcttgcgattctttctcatttctggggtgatgtttcgtctagaatatctgctccccgaaactctacttgacatccaggctctcgttttctctgcctaaaggacaaggccactaaactaggcattccgactttccccactgcaatatgtaaacttttaataaaagtaagtcacttctatcatagcttgtatcaactgcttgatccataaagggctgaatcacacaggacgcaggtagaatatacgatttttcaaccaaaattcatgtctttttacaatgaaaccagaagtaggcagaatatatggcataatcacgagtgggacccgatcaggaaggcggtactgaaaattcaggcagcgtagcaacaattccctagttagttaactagttatatttgacagcaagaagtggggagagtgacaatcaacttgaggaaagaaagggggtatgtctacatggagatttcgagtttgttcaagcctttatgactctggctccccaacacgtgcgagagccttcagacacgaaagatgcttatcctgatgcagggcatcgccaccattcttgtaagccctgaggacctctgaatccctttgtttgattatgatgaccatgtactggattccatcagtggcaagctcttccagggctttctcattggcctccttggcttcttcctgaatctcgtggagtcgcttcagccagaacatgtatctccatggcgaaaatccagcaggtgatcgctgtccgagctccgattcaaggaacttctcgccacccttgctgatgtcgctggggcattcgttccaacacacgtctgatagtaagaggaggttgtggtttccatttttcagccaagcaacagcagctggtaatagttgaaagacctcaagctgatagataccacggttgaggtcctcctcgtctgactcgctctcaccccggagtgttttagagctttcaaaaagatcacggaagatcagaagtgcaacttggcacagcctatccttagcgacacgagtggatgcgagtttggctaggaatgttgcaaagttgagacggtgtgttcccgacatagaaccaccgttattgatccagaactcggtcatatcgctagccaaaaaggggagatcattccaaagtgtcccgtcgacggttcttgcgatatcaatcccacaggttcctcgtgaaggtctagtcaacggccccattccttgaatgcggacgatatcgaggactataccctcatgttcaggtgattcggaggagatatttcggccaagctcgtagtacatataccacagggaatgaatatggccttcaagagtatctaaaccatcaccaatatcgcagtatcggctggtaacgacccaggtccggtcatagaaggctacatctcgaatttctttgaaatcaccccgagcgatagactggcgggtactttcctggtctctacgagcatagtcgttcgttatgataataggagcacctctaggcagagagctcagcagagaatcacggaggtgttgcattttgggaacctgacaatgctgattgatgattcaactagaattcaggtaagagaaaaaagacagtaggaaaacgaaaggattgatatggtggagccccgcgggggcttaatgagaacccccggtactaggcagcaacgtacagctcaccaatatctgaattgttggacttcggtatgcgctggcaggatgtactgttttcttcgctggttgtcgatcaaccagcaagacagaagtgcatttcctaatagactgggtggccctaggttgtggccctggacctatttcgacctgggatgatgccccagccctatttctaggcgagggtactcgggatccggttcggcccggcccagtggatacacacggtggtctccactccaaggtatcttgtgggagccctggaggtcttacaacctcagcaaaggttccggaattatttttattaggagcaagggtgactagataagagggcagagagcattcgatgcctttggattgctttctcaataaaacgcgccggctcaatgaactctactttgcctgactcgatcgaaaagccaccactgagcgtggatctttggtgaaacacattctggcagatataaaaaccagtcatcttcctcgtaagggcgaaggcaggttgtacaccggacagattcaaaatagtcagggtagaacccgctatattcccagtcaagtatcccagaaatcacatacttgttgtcggtcaatttaaccgtgatattgtccggtgtgatgtctccgtgtgtgaacacgatgcgagggcccgaattattagtaaacgatggtgctaattgacggagaaactcgatgaacacgttgccgcctggatgcgggcccaagaataagaatgtttcaaaatcctcaaggctgaagataggtgtctcgctcactcggacatgcctcctgagatctctgcagccttcacctgcaactcctcctaaaggagtgccttcttcaaaaggaagagttctcaaatctgtaagcattgtgttgagttggttgctaatagaggttttttgatcagagtcgagtgtatgccagacttccctaagcgttgtagatcccatatgactcatgaatatcaaagaaatcccgctcatacgtaccaagccaagaggctttggcactggaatattcggcttatgacggtcaagatattgtaaagcggtatattgagtattgtgttccatatagcgaacggctttgataacgatttccgaagagcatttgaacactcctttgtggtgaaagaagggagctttgtaaataatctcactgctctttaggacttcaaacagcctttgagagagtggcaatccctcggcagtttgtgatattggttcgagtaattttgcaaccgcatccgaaagaggaaacacaatttcaaccgggtctgatgggcaaagggattctcggatgtcttgctcaacgtatctgggtttctctggcagatgatgatgtcagctatgcgaataaggagagtctaaattgcggtattgtggtgcttactggggctttcgattgtggttctcattctcaaaagacgttccaaatattgagtggggaattgatcggccaagtcgacctctggatctttcgtgagtgcggcttgtagctttttcaatgtacgggcattgaacctcacggcttcgctgacagattgagtttcgctggcaggccgagcttcgttggcaggttgagcgccctctaagtcgaacgcccctttttcaaccatcttccgagacggcaatctgagacctcacgataaaaaaatagaaataatgatctcggatgcctaaatggaagggaggataagtaggtaaaagaaaatggtgactctctagtctgctttgcatgttgtaccttggctacaccgccattcctcccatccctatagcgagctatgcaggccgaggccgagcatctcagtcgacactatcgcaatcgttctcagtagggcaaatgtcacaatacgtactatgaggaggactgcctctacccttcaacgggcctcgaggttggatattactcttgtatgatgcaagggatggtgaagttatggatagctaacatgcattagatgattccctctcttttaccaagctccgagctggccatcgtttctcaaccgctgcaatcacaagagtcaaaacaagctcaaacgcaaagaacatagccgcaatctgatatccgactttgaaatgtggcgcctggctggtattataagccaatagaggaacccaggcattgaatgtgaaggcgactgcctccatcaccccaataacaacaatacgatgctcagccgagaaaccacatgtctcactaacccaagacgtgaaaataattcctgcacccgtctcaacataagtcaacagccaaccagccatcattgctgcggtgttatgcaccggccaaatagagagaattatagtcccgaccaatgctggtagacaagcaaacacaatgacaagccaacgtatctgcaaataatcgcttgtttaggcatagaggagcgtaaaaatgatttgcagtccatacccagcagatgggatgacgttgacttgttcaactgtgtatctgccggttgacttgagccacacgttgaaatacgagtagatgcgcaagccacaaacgtgagcaatgaagactgtaggaatcaaccacaccggccatgagcgaatgacatctaggaatgttctccatgtgagtttcgaagctggtgcacggccaacggcctccattctctgcgcggcatattttgtatcttacttgctaagccatcgggttttcgagtcattcggagaatcaggaatagcccgaaagccgtatagagcaatgggtactctaagaataccataagaaataaacaaccgctgccaagcagagagacctgcgcggccattcatatccgaatacagcgctgcctgaagatatcccgaaaacatgttggaagcactagaggaggcttggaatattgcgctccgttttgccagttcctgtggtgtataccaattccctagaagtgtgatgatgcccggataagcggacgcttcacaaagtccgatcaaaaagcgcagcgcaaagagcgtttcaacattctttgcgcttgcgagtgccatgacgaatattctccatagtagctcaagggctggtaaccaaatagacggcctgatcttggtgaggaccagctgggatgggagttgcccgatgagatatccgatgttccagtatgtcgtgaggtagttcaggtcattgccctttaggtcgagggcttctttcatacctgagacgtaggcattggaagtctgttcatgccaatatcagctttgctttatccgatcgatgggtcacttacattggattgatctaaagatttgataaaatatgcggtgcaggcgtagctcaatagccaccaatccacctgaacgagtttgcgctcacggggagatttgtcccagatgtcccaaatcgatgccttcagacgcgctcgcctagcttgcggtatagacacctccggctcattgcttggtcggtcgagctcctggtccttgacctcatgtcttggtttcaattgatctccggacaacatagtctctgaatttagcagtgagtaatgtaatatgttctacatatcaatctatctcatttcatttcagtaatatttatactacctagcacttttgccaattgttctcggacaggcacatcatagagccctagcggcgcggctccgacaggttttaccgcattgggacgaaattgcacattatataagcttatggcgcaaggcaacatcccatatctgagcattaaatagcacagctactgcaagaattcttagtctttccacgaatcattatggaaatcgaccgggtagctgttatcggcgcaggcccctgcggcctaggagttgcaaagtatgtgtttgcctatcgagacaaagaagaacgtgaataattaatagtatgccaaggtatcttcttgctgaacgaaaattcaagtctatcacaatattcgaacagcgcgaccaacctggcggtgtttggaactacaccggcgatgagggcatcagcacatcggcacttgcccgtcccaacccgagtcaggagcctcaacagcccgtgaaaggaacttttgcttcccctgtatacgacgcacttgaaacaaacatccctaaatcgttgatgcagtttaccgagtatccgttccccgcggccagtgcgctattcccagcccataccgttgtgcgagactatcttcatcggtatgcagaggaattactgccatacatacgtctgaactctttgattttggatgtcacactgtcaaaaaagcatccaaggcccgagtggactgtaacctggcgtgatctgcaaactaatgagattttggtcgagcaattcgatgcagtggttgtcgccaatggtcaccataatgacccatatatccccaaaatcacaggcttagatgagtggagtcaaacctatccaggctccatcatccattcatcttcttataggcgtcccgaatcatttgcaaacaaggtatgtacccaacccgccctctaaaacaaacaattactgactaaaaatagaaagtgattgtcgtcggacactctgcctctggtattgacatcgcgaaccaaatcggccgtgtatcaaaacacccgctgctgatttcggaacgcacggcaacaaatctctctccacaacaagccgccgttgcccaaagccttcctgaaatcagtctcctcagtgtcgaagatggccgtgtgcaatttgccaatggccatgaagagcgagatgttgatcacatcgtcttttgcacgggctaccacttctctattccatttttgtcaagtctccagccatctatcgttacagatggcgtgcgtccgcatcatttgtaccagcatgtgttttacagcaaagagcccaccctcgctttaatcgggtttccccagcggattgttccattccccttcagtcaggcgcaaggggcatgggtcgcgcgcgtcctggcaggacgactctcgctgccttccgaggctgaaatggagcggtggattggcgactgggtagtaactcgcggcgagggacgcggcttcaacacccttgcctttccgctcgatgcagactacatcaattcgctgtacgagttgagctcgcatgcagctcggaaggatgggttggagaatgatgggcgtggtaaaaggccgcccttctggggtgaaaaagagaagtggacgcgtgagagattcccgttgatcaaacaggcgtcgcaggtgcttggtagtcgacggggtgagataaaggctttggaagaccttggctttgacttcgagagggattatgttccagatgccgaggcgcgtttgtagactgtcttattgcctcagataaagatggactagctgttgaagctactccaatgaaccgatattagaaggggctagaaagatgtctcaaatgatgtcaagaaagacacaaaaataaccggtgcaaagacatagatcaaacgatataagaatcccgttagactctctagagttaacatagaaggtgcagcttgatcggaatcaggaaacgaaaaatataagtcccattcagagcatatcagatcctacgccacccagaaggttcatccaatgcgtctcgaatgcagtctcacccatattgtcatctgccggactcccaataccaacgcgagtagcaaaatttccactatcaggcaggaaattgaagctatgcatagtgagagattgagaaactcgtctctctgtcactttggacctcagaggccagatgtaaaagcttgcctcgcccatggtttgcctcagcaatacagccaagtcatcctgtattgattgcagtcccaattcagtatccagactcgaattgggcatcacagaagacccagataattgtctgcgtggaattaagggactcttctgctttgttgtaatatccgcgaggcgcctcaaaatccgagaggcttcatgtgcagcatgccaagaggaaggaaatagttcaaacagcgtcacgagaagatcaatctccggaatgtcgtcaaaggctgcccaccgagcagtacagtaaaggaaaattgctgccaatgaaaggaggcgacagagggtaatccaattcatgggtagatgtcggtgttcatgcaggattagactcagctgtatgtactgctgcgcagcagccttgaggctcggcaggttttcttcggttgtgtctccctgtgcaggagtgtacaacagaagaagcaagttttggtagcggacattgagccatgttatggtagtatgaaagggaagctgatcctgttctgataaagtagaacttgataatagacatccctgtgtataccaatcttcgatttggaggcgtaggtcctgcggacgcatagaaggatgtggatcgtaaatggcattgacaatgcgtgtttcgaggcgtcgtagagagatcacatgccggctgacttgtagcgctatcgcgtactgatgtccttcttcggaaccatattcatgtatcataatacttggcagcggtatccgcattatactgtcagggaaggcaaatggaagtccatacgatatgctgatcatgcgagtgaacacatacactgaccaacccagccgacgacgtagctcaagtacccgaggcgagaggctctgattggtaggagtttcgttcatcagtccgactgctagagcatgactggtcagaacgccggtaatggctcgagggtcctggtcgcagggtacgaagaggagatacaagccgaggaggagcaaggtgcccactgattgctcattcacttggcagacacactcgcagagcactcttttgagacacggctgaaaatcccgttcctcgatgctttgcacttctccagcccgctgcaggcttgtgaagccgatggccattatcatgtagagtcgggtgggcacagccgaccgggggagaaggccatcgtctgcttctttattggcgagtgtttcgaaatctcgaagaacaagttcgctgtcaagaaatgggtatgtccgatgaacgtgtcggaaataggcctgcaagcatttgcgacccgctgtaacggaaatgggcccgtcttcctcggctttggaagtatggctttcctcaaaagcactctcactgggctcgatttcactagcatcaagtgatgaagactgcatcggggtacccaaggctatatctcgcccggtctcgatgtcttccaccgatctaccggcggggagtgtttcattaacaagctggctcagccaaacaatgcgtgattgcaattctcgttcgcgcgtctgcggactcgcagagcgctccatcagagaacaaggtagccaagcaacaagacatggtttgcaagatccttcgtctgttctggtgcaccgcttcttttgctggcgacagcggcgacacgccggtaaagggggtttacggccgttggtatctgcgggtctaccccgggatcgtcgtgtctccggttttgaagaattgcgatggactcgaaagcgatggatggagccctccattattgccggatgaaaagggtcaatttcggggagacaccgtgataaccaacggagcacgccattctttcccgcaacgagaaatacccatcggtgccgcaccgcgttgtatattcaagaacatgatttctcgcaatgtattcatattttctttcattttattcttctccaataatttactcccatcatggtatctgaaaccgaggcggtggaaatctaccgcgacgccatcgtctttgacgggttgaacatcgccaactggtcgcgcgagatttttgaagcatggcaacagggcggcatcaccggagtttcatgcacatgcggtaccttggaagggttccgcggcgccattgccaacgtggtataatggaagaaatggttcgaggaacattccgacctcatcgtacaggcgcactcggtcagtgacatccgcgaagcaaagcgcaacggcaaaaaccgccgttctattgtcctggcaaaacacagccggcatcgaagatcaactagattacctacgtgtcttccgcgacttgggtgtgcgcaagatgcaactcacctacaacacacagaattactctggagcaggatataccgagattcgagactcgggtttgactagatttggtcgacaagttgttgatgaaatgggtcggttgggcatcgtggttgatttatcccatgttggtccggtgactagcgaagatgttatcgagtatgcgtctaagcccccttgcttcggccatgtgttgccaggtggacttcacgagcatccgcgtaacaagtcaaattatcttttgcggcttattgggaagaagggtggatttgttggaatcagtcaatttggaccgcatatggccaggggcaatgaatcgactatcgacgattatgttactgctgtggactttgttatcgatttgattggcgaggatctggtcggcgttggttcagatgctagtgagggacatgcccgacaagtgattttgtggcctggtgtaatctagataaaggttatgcgcgtcgcctcactccctggggaagccagacggctgtgaagcctctgggcccgttgaaggaacgcccagaactggccaaggctatggctcgggcaggctggtcgaaatcaaagatgcagaaggtgttaggggagaactggctggattatttggaacgcatcattggagagtgatgctacatatatttagtttaggtaaaggcaccggtttcagtcttcgatactcatttatcccgctacatcgatcctcaatgatgtatattcccaatggaaaagagtttgaatgctttaaagtattcctaaggtgtgataatgggcacgatagattggccaaaagatatgtagaacacacaaaggaatagaataacaaagatctaaaagtgtcactgttttataaacgcattgaaacacatcaagtatgaacaccccaacctcctccaccagggctattgatttgcataatctccccggcctgcagcgcgagtgcggctttcccagtaagagaaagtctctccaaagccgtcttttcttcgttccacttgaatgcatagttctttcccacagaaccaggttgaccaccgttcataccatacggagaaaacactcgccgatcactgagaatgctgaatttgagcggaattctagcctcgatttcacggaccgcaccattccctcctcgatactcgccatctccgccagtattggggttgatcgcatgtttgcgaataatgacaggggttcgcttctcaacaacctctgcatctgtaatcttcgtatttgtcgagtgcgcttggatggcatgttctccgtgccagccaggtccagcaccacaaccgcctcctacggtttcgccataattccaccctggttcaataatcccagtggcaggattcctccctcccatgccccagccgaagctgttcgcacagccggaaaacgccgcacagctctcgaatgctcgcaagattgtgtcaattacacgctggcttgctagcgtactgccgcatatggccacggaggcgctgggtctcagaactgatcctttggggatgcgaatatctataggtgatagacagccatcattgagagggatatctgcatcaagcaggcaccggacgctgtagatcacggctgaatgggtgatggatatagggcagttatagtttccccacatctgaggaccagtccccgtgaaatcaaacactgccccgccagcttcatcgatcgagatagacacttttataacggtgccatcatcaaagtgatcactggcggtcaggggcatggtcctagtctgggaaacactcttaaggtattctctgactgctgtttcggaattcctttgaatagcattcatataacgatccacaaaagggaaagtgaattcggcacacatcttctgcaaaagaagaataccacgctggtttgccgaaatctgcgccttgatgtcggagatattatcgtccaatcgacgacttgggctgcacccagggagatcacccgcagccaagaaggcattgcgcacatccgtttcaaggaaaacaccattatccactattttcatcgagcgaacattgaacccttcttgccacagttccttggagtctggcatcatagatgtgattccttgtccacctatgtccgtatggtgaccacgagccgcaacatagaaagcaacggtggtctcgccgtccacaaagacgggagtgatgatagtcagatctggaagatgggttccaccgcattcagggtgattgctgagaagaacatcgccggccttcaactttccttcccatagacggtgctggtattggattgcatattgcatgcttccgaggtgaatggggatatgcggggcgttagctactaattttccctcccgtgaaaagatggcacacgagaaatccaggcgctcttttatgctggttgaaatagaggtgcgctgcagtgtgtagcccatttgctcggcgattgccatgaaccgatgagaaagaatggaaagctggattgggtcgatagtctcggactgagctacttcggtattggagggggttttagtctccgatttctcgaggaccaggtgatttgggaggaggaaggcatcaaaattagactccacgaatatcgtttgagtcgcatcaatcaacaaggcaggacctcggacctgagagggtcgccggattgaggcaagttcaaatatcggaacgttttgccactctgaatcgaaatatacagactgagttcgatcagcctgcagatagtcatttagagacttgacttgttctaactgcgaatatggtgataattcctcgatagcaacaccacttcggccaacaccacggaccttgatcgaatcgatctgtatttttctgtcgagaacgaatgcaaactctcgcagatgtgtggctataaatgaggctccataatcttcatccttaggtttgggcacgacaatgttggtgtctgtaccggtatatctcaaactcagggattcttcaaagacaacagtggatggatctgcgccctgtgagagaagggcagattcagcttgggatttcaggttgctgatatgagctcgaatgtcgtccagcactttgaaatcgaaggaaccaacaaaagggactgttttttcgacctgcagatcggcttgagaaattccgactgctgatagcagtgaagagtgtttgtggatgaggatccgcgtgataccgagtttgctagcaattgagcaagcatgctgacctccagcccctccaaaactgaccaacgtgtgactgcttggcgcgaatcctcgcacttctgttgcgttacgcattggtcgggtcatggtttcgtttgcgacatcgagaaatccgaatgccacctcctcgggtgtgagcttttgcccagtttgctcgttgatctcgcgagtgagttcatcaaacttttgtttggtaacatccagatcgagatgttggttcgcattcgggccaaagatacccggaaatgaagacaggaccagtcttcccaaaaacaaattggcgtctgtcacagtaagaggacctccttttcggtaacacgcaggaccagggtgtgcccctgcgctctcaggtccaacgacaaagagtccatggcgggcgaacagcatcgaacctccgccggccgcgaccgtcgcgatgttcagcatcggcgttgtgatctttcgaccccccaccgtcgtctccgtcagataatcgtattttccatcataccgacaaacatctgtgctggttcctcccatgtcaaacccaagaacaggagtcccttcggcagcatcaaagcaagttcgagcaatgcccacaacgcccccagctggtccgctgagaagagcttcatttccgcggaacttgtccgcttgtctcaagcctccgtcagatcccataaactccactcgctgaggaagtacactaaagccggtctggaacgccttaatataatcccgcacgattgggtacaagtatgcctctgatgaagccgaactgctgcgttgcaagaatttgatgacagggctgacttcggaagctttgatcacagtttcaaagcccatatcttgcgcgatgtcggctacctggtcctcatggccagaatacagataggaatgcataaaagagatgaccaaagatgtatagcctgcagactgcagcccgctcagcacttctcgaacctcaacgggatcaagtgctttcaacacccttatcacctccccactgggtgttcggaccagtgcaggatctgtgagtttggccgctttatctgaaggaaatggattaagatcatagtcctcgatagtgatgcgttcgtcaatttcgaccgaagttgaatgcagcgcaggaggctttctgacgttcaaggcaaatagcttcggtcgagtttgatcatcgatgacacagacatctttgaagcctttggtggtgacaaatgcgaaatctcggcctttgccttcaagcaacgcattggtcgctatggttgtcccaatacggcaggaggctattcgggacccgtctagcttttcacccactggtatttggcggttttcgataatctctagtgcccttcgaatcgcctctgttggggcgtcacggtagttctgcggatcttccgacagcaatttgaacacaaggtcatcacgaccggggatttgaaccaggacatcgcagaacgtgccgccgcgatcttggccgtttagtatggtttctttaatcgggagcggtatagagtcacgtaccgatggagatgtttatgcctggggcagtcgtcatggtggctgactatgtgcgatttgacaaagagctctgtcgcaaacgtcgccaaaatcaattggtctttaacattccgattgaatattgatatcgctggtggtcggcactaaaatcacgcgttatctcgtggttttgaggtgatttccccactcaagtctaggagtggatattattttcggaggttggccgacgtctaagagcaaatctggttcactatgccgcagtgtctaacagtaacgccatctccaatttgccactgtccactatttacatgtccacggttgaaaaatcagctatgcgaattcatcggagtctctactaggtagtgacaaaatatcttcacagaggttaggtatgcacgagactttcaaccctctagaaagactgttatcaggcgccaatgaaaggaatgtcgggagagcttcagatacgatacaatatatcatagaacatagatatcttcattcagtggtcctatctctttaaagcatcaaccttgctaaaacataccggctccaaaagaaggcttacgaaagatgtttctcaatgagtccgatcacctccgcattcttctctagatgcacgctgtgattggcattttcaataaccttcagctgcgctcctggaatcctcgaagcgatatccttggactgttccggtgggcaaatccaatcgcgctcacccacaataaccaaagctttcgccgtgatcaatggaagttggtccctataatcgaagaatttctcctgcttggaatagaggtcatctttgcgcggtcagctttattctgtttggaggttgagaaaaactcactgtgggactttgcataaaagacggtctcgatgttgtgcttcaacgcgagatccgggtcaaagttctcgctatatagcggtgcagccgcgtacatgacaagtcgaaattccagatcgctctcaaattgaccgaatatcttatctttcaggaaattgatggaaagatttggggctctagatgccctttgttccagagtacggatagccgtttcttcatcttgtaaaagttagaaaagacgtcggatgttgcacgaaacttatagtaacactttagtagcacttacggtgatgtgaaggagcagttcctcgaagaatcaaatgggaaacctgagacggatatgtgattgcatactgctgggctagaaatcccccaaaactaccaccacatatgatacagggttgattaggtccaagaaaatggcgccttaaaccttcaatatcttcaacgacttgatgaaatgtgaaaggctctgttcgtgaactttgaccatgtcctcggaagtcgaaagaaagtactcgatacgaggacgaaagggatgagtatgctttgtaatctgacttatggtcgcctgttacattttatcagtgaccttagaacgtttgattcataggagtagactagaggctaaccaaaacctcgcccaccgtgtagagtgattatcaacggtgcatctgcaggtccgattaatcggtatgctaactgggcgccattgatagagacgtattcaaccattgtgtgttatagcaaatgtaagaatggaggtagtgaaatgagataggaatgatcaaactgaaaatcaatcatagataatagataatagtcgaaataggaaattgagccgaagccggggagaagtccaacgccaagattgccaagcttatctcgtggtgtcggccccgctccgagaaatatttctgtaagaggaagatttgagcggatcggccattctatctcatctttggcacggagtccacgcaacaattagtttaaatgtcgtgataaggttgtatatgctttttttgttgcagttgttctagaatatacaaagtactagtacattaaaactcctctctcccttattataaatgatcttctcgtcacaaaaggaggatctgaaatcctttttgactcgtcggacgtttgtctcacaaatccacaatgactaaaccagtcgaagagatcggggttcaaaagccaatttcaactcctaaagaattggacagcgaccactcagaattacaacaagaccgccatagccaaacggattcatgtcagaatcagtctgaaccccccaaaggttggttccactggcatgagcccggcacttcaaaggccgacaaaaaactcattttcaaactcgactggttccttctgagctacagctgtctgtgctttttcatcaagcagttagatggaaacaatatatccaatgcctatgtctccggcatgcaagaggagcttgggtttggaccaggaaacgaactcagctggatgaacacctattttaacattggcgcgattgtcggagggccaatctcaaacatggccttgaccatgatccgaccgcgatactggctgcctggctgtctgcttacctggtcgctcttcgtactgttcttgtacaaatgcaacaatgcatccgcgttctacggtcttcggttctgtattgggttcttcgagtccgccgcctggcctggaatccagtacgtccttggatgttggtatcgccgatctgaactcgcgcgccgaagtggtctcttcgtcgtgtccggtgtcctgggacagatgttctcgggctacctgcaagcagcactgttcaaagacatggatgggaaagctggattgtcggcgtggagatggcttttcatcttcgatttcatcctcgccatcccggtggttatctacggctttatattctaccccgatacgcctcacaacacgacggccttctatctctcggaatgggagaggaatcgcgctcgccagagaatcgacgaagaaggccgaactcccgttggcaaattggaccgctctgtcttcaagcgcatcttcttgtcatggcaattatatgctttttccgtcggatacgcattgtggtctctcacatgtggttcatacgtgatgcagttctttggcctttggcttaaatcgctaaagacatacaccgtccctgagattaacagcatccctacttccatgggagccatcaactttttcttcatgattggtacgggatatgtcgccgataaaattggccggcgaggacccgtctgtttcgcagtcgggtgtcttctgacattctgttttgctgttttcacggcttggccttcatcaaatgggttgaaaatggccgctttcattctttccggctgctacggatgttatacgcctctacttgctggttgggtcaatgcgtcatgcggtggagatcaacaactgcgagcatttgtcttggcgtttatggtcagtcttggatcggctgttgttattccattccagcagttgcagttccctagtggacaggcgccaaaattcaccaagacacacggctgggttagtgggctgtgttttgttgtggcattgagtctatggactggatttggaatcgagattgtcgaacggattatgacacgtgggaagcgcaaggagagcctacctaaggaggaagatgtatgatgctgttgagcatatggaatgttcatattgtgattcgtgagagatattttgttggttcagtaatatatatacatcctggactatttcaaaatctttatgactgacccgccccattgttgacttataagtccttttctttcaccttgccaagtttagaatcatcaaaaacccagcattaagtaatcctctatacaaaactatgttttatatagagtggtttgttactcttgcggtagaactatctgccctattacagccatcttatttagacctaacaagactacttcccatgatgggatgcagcgtttaaggcgatcccaatcgtacgttatgccattttcgtagctattgtctgcccactggtcgtatggacccgccgttattatgccacgtttctcgtctcaagggtggggctagaaccgaactagtgttgtcagagcctatataatgtctcagatgagagacccttctttcataaaacagctttttgatatatgacatctatgtgagtagaagtggctcattacgttataataagtcgtaaatagccaatttttgctggcaatgaaagtctatggactgcgatattcagatgaatccgagcacatatctatctgccgctcgagttcataattcaacccgtttctctagtgcctgactgccttcgatgaactaagtatagtgccgttctctttaggctcgagacgtcagtggaagtaggagaactcaggaagtacccgggatcggcatggtcggagaaggggccacatttctcaccacacataatggaagtagcggaggggctggattgcttgttcaccataaggcgatcggaagtgggttaaaatagctataaatagccagcgaaggaagagaaaaagctccgcaaagcttctatgccagtcgatgtacttcttaagaacgtacgacacggcattcacgagtggatccaaggaacccaagggacaaggccaaaactaaccaaacggacgtccggacaccaaccactgggattaacctcggcccaaagggccttaaatcgctgctatggctggcgttatcgggcgggcttgatagtagtggcgatagcggaggtagaattatatttcttacacgacacatcttgagatgtcgttgtggaatataatcttttcatctgctcgtgcaaaattgaagtatagaaaccacttcgggggagacacaaacgcaataggaccgaaatccctagtagtcgctataaaatgcgatgctgagccctgggcatcatcatgcgcgtcaggtaaataatagaagcaagtggcaattacgatttcaacttcagaaacgacctatagatataaataaccccgagtagcccaattaccgggcagtttgctccatccaccaaccaaacgccaaagcagaaaggatagtaaaacgcaggcgaaaagacagagaaaacagagacagaagtaaagtgaacagagttggattattaacaaatacagatccagaaaatagataggtgccatacgctcataatctggtatcacaagaacgtaaagaaaaggcaaaaaggaaatcataaaacagaagggattttacttgcttggtaaaccaaaagccaagcaagagttagagtactgacgccatgatgcacaggaggcaatctgtacctgtgcaaatgcaaatgtcataatgggacttccaaaattgaggagaatcagccccaaaatgtaaaagagcacgctccacacgtgtctagcggacttccaatggctcccatgtacaatggaccaaatccgaaaacacatttccgtccaaaatgaatcaccaaaaagtcactccgtggtccatcgcaaggacgtcaaatgctagaaccggaaagggaactggatggctagatgggcatatatataaaaaaaaagaataataaaacaaagcaggcttttaaaaagaaagaaggggggtgaagagggcaggtaaagacccggggaaagtccctagcggcgagtggcgatggcttgttgttgttctgggctaagacggtctcgcagaagcatcagtgggcgaccgggctcgagaagacccatcatcatcttgcctaattcgttgtgtttgatgggcttggtcacgtagtcattgaaacctgcgcgggcagcgttttcaatttgatctgtcattgcgtttgccgagagagccatgattggaatctgtggataatggttcttttgctcccattcacggatctctctacaggtatcgtagccattcttgataggcatctgaatatcgcactaccattcgatgcggttagttttgccggagggaaagggtataaagtcaggctcacgatgataagagaatagtatcccggctctttagaaagcaccatgttagtgcactccagtccattggatgcagtctccgacatcagcttgatcttgtccaaatacttcagcataacctatatatgagttagcaaccaattcaacgaggttctcatgaatcaacttacgtcgcgattggtttcgtcgtcttcgaccagcaggattcgataacccttgttgcctaaaacttctttgaccatcttagaaacggtcttgaagttgttattgatctcgcgcgccatgtcttggttgcgatccttgctcagctcacgcttgctcttgggatcaaagatcgttgagaaagcagaaggtttgataggcttcggcacaatgaaaacctgctttcctgaagctgctagctccttgacctgtgaactaatttgacgcttttggtaaaggtctgaaatgatgacgatgacgggcgcgggatttaagcccgggtctgacatgttttgaataacctccaagatatcatcagttgacagattcaagacaagatgtgtacaaggatgggcatcggaagtggactgcatcacatctttccattcgtcaacatcatgtaatgccgtgacctcgaacggaatctcatgagggacaatctgctcgatgtgctgctttatggcatgccgggagtttttgagcggacacagaattacgatcgagaaaggtccgtggacaggcgcagataccgggcctactggtgtatctggagaggcagattcaggtgacgctacgctgactggttcgtcgggctttgtaacggcaggttgggtccttgagctcgagactgcgtctgccagattcgtcaaatctgttgtctgctctaatggagaagacaggggtgcagggccaatatctggagtcgggagggcagaggatgtaactgataacgaggcagaaagtgtagtatcagagcttttgctggatgagtcggagtttcgggcggctagaggaggtgcttgtggataagaggtcgttctagactttgccggtcttcttgaagcgcctgaaccctggcgcatcaatttgggctgctcagagggggaaggtggcggaggcgcatcgaccttgacgttaaaagagaactttgctccctggccctctttgctgctgggagtgagctttccgccatgcatttcgacgagttgcttcgacaggaaaagcccgaggccgctaccagcatgttgctgtgtcccattttctccaagctgactgaatcgttgcataagtcgttccgcatcttgagagctgaacccctttccggtgtccacgacctcaaagttcatgtatgcctgggtgtcattgggattcgcagctggatcccgatacatgtcacagcagatgtgaatttcaccatgcgcagtgaatttgactgcatttccgagaagattgatcaggacttgacgaattcggaaccgatctccaatcaccattgatggcaagtctttgcctatgagatagttgatctcgagacccttatcgaccgctcgggaggcgatagtgtcgattacatcctcgatcattgatcggatatggaaccaagatttgaccattgtcatcttgccagcttcgacacgggaaacatcaaggatgttgtcaactaactcacgaaggttagtggagctgttttgaatggtatcaagcattcgcctctggtcactgtcaagctgcgtatcgagtatgaacggaattgtaccaagaatgccattcagcggggttcggatttcgtgggacatgttgctgaaaaactttgtcttggactccatttggtgattcaactgttgcatggccttgttgagttctctttcgaggtttttgcggtcgttgatgtcggtacatgttccgtaccaggaggcttcctcgctcccgaaactgctagtcttcacgcgtactacgcgaaccagatgccacctaaaatcaccacctcgagaacgaaggcggatctcggtagaatagaagactcggccattctcatcttgctgcaaagaagcaatgccgcgcctgacaagctcgtcaagagctgttccgaccatgaactcataaggcccgccatcacttcgttccgcgttctgagatgttttgttgagcgacagttcaccacacttttcgagatcgtcaggatgaacatgtttagcgaagccgaggtcatgcgcttcctcgagcggttggccggtgtacagattccactgctcgttgacaaatatcaatccgcggttctccgttgcctcaaacacaatctgtgggatcgaattggaaaatgcacgatactttgcatcaatcgcaaacttttccctctcttgagttgcctcaagctcagcaatatgctgctcatgaatgtcgagaaaagacccaatccagtaaagtacctctcctgttgacgatagcagcggattggcccggaatatgaaccagcgatatgctgattcatcgttgaaccttcggaccctcactctttcagtgaactgtgcccccgtgcgcagagcattggcccatttggtatgaacatgctcactctcgctactatgaatattttgccaaggatctctaaatttttgctcctggtgctgacttcgtctgtaagcatcaaacttggaatttgtccaaatcacttcgccactctcgggttttgccaggaataaatgcaaagggatcgaattaagcatcagctgtgctatcgtgtcagagaacgggcgcgggagctcccgttgtagttgggcgtacaacgagttcgtagaggcatgacgtgatgattgctgagtaggtgaaagaacattgggcggtctgatctcttgcagtggtgatgcgacgtagaacgattggtcttgtaggttggtctcatcgctggggattgatttccaggccactttttcgggagaaattgttgtccttgagtcgatattggtggtcttagatctgaaaagccgtggtctactctgcaatgcactgtcacggacacttttgttttgcgggacattgaagtagctgtcagcaccttctccgccctgtcgtgaagccactcctggggacggatttgcggacccgaatccaatattgccaagatcaaatcccggtgtcccaatggcagaaatagtaggactgaacttaacagacgaacgatcactagggctattggtacttgcggacgcggacattgggttgttgttgtcgccaacggagtagctgacgtgaccgcttagtcccgcaacaagctcaagctcactgcttgcatcggagaaagtgccgccgaggcctaaaagttgaccatagcgaggtgtttccatcttggatgagagttgtttttcaagctggctatatcgctgagccaagcagaaagaatttgtcaaatgcggcatcagaagcgagagtgattgtctgaggttaggaggatatggaacgattgtgcacaacattgacacaatggcaacgggaaatctcaccgtcgatgaggactcccggtgagagtgaccaccatgtaatagaggaatatggataacggtcttcgactgatcgatgccaatagcctcaagtggaagattattagagtagtcgtgcgaaggcggatgcttggagaaagctccttcatcgacggcatggcttgtgaagaacggattctgctctgcgtgcgtgcggggagcaggcgatggagcaggggactgagaccacggagactgcggaacctgctcatattcatcatattgcttcaagccatgggcaccgaagccttgctgcatcggtacattccccattccacagccaaccggaccatcaacgtcaggagtaacttggaccatctcatttggactgttggcggactcagtccaacgctgcggatattgcgcgctctctgcatactcacgtgttaagatagtgggacgggtacgcccaaataacttgaccacgcctgtacgcttgatgagaggatctagttctacctccaatggtctaggaatggggaacacagcctgccgcatattgccgaggagactattgagtgattcgtctttggcttcggagttctccgtccaatcatccgtggatggcgagtcttgagaagcgatatgtacgtgccttttctcgggcttgacatttatcttcgaaagttgtggtcggctggtagcgtgaggggtgtggccttggcctttatcaaacccagcgaatgagtggcgggataataaagatggtcgagaaggtccaggcattctagcctggtggacggtctcgggtttctgttgcgagacgcttttgcgcgagtggggtgcctcagttgatggtctcttctctatatgacgtgcttgaagttcatgcaacgaggtatccacgttctggttaaatatcgccttttggccccaaggtacgttctccaaatcggtcacatctccagggacagccagcgacacacgctcagccccgtaatgtgtttgcaatatattaatgaggttggtccaccacaattcgagtcccgaatccgcattcaactgaagtgtcaggtcataaagatcgggactggcaaaattcggatcttcctgcgtctggctatgatgagcgggcagaaaggtcggatgcggttccgacgcttttggttctgaaggtagagtttggtaccctggtgtcgaagaatggagtttctccgatggaagcttcagtctgaatggtccacgtcctatcgattcgattcccattttggatggtttggtctgtatgtgtggaaagggataggacggcgtgtatgctggtttgcgatcggagggtgtctctatctggacacctctgattgtccctgcggaacttaccgagcctgcggaggtatgtgagctggtgaatggggcttccgttgaggtattagacaatgcacttgacaaacgtctctttcttggggtatcattcgagggggcggaggcgggctgattctgagatgagactggttgggtttgctgcatctgttgatatacaaggagatcttccatctgctttcgcagttccttgagggtatgtgaactgcgtccttgatcctcctgtcgttcgacttccgatcgtgcgtcctcggtgatgggtgttagaccaacaacctgctccgtagaatcgccgcgcgacaaacgagacgggttgagagacgacttctcaagagcatctaccctatccgcaagttcatccaccaatttttgcgactggtgaccatgtgggggacggtgaccaggcgatctgagaggttgcatagacactgccgatggatgtgtctctgatggcgaagggaatggagaactcctcctactatacacatcctccattctcacgcctccgcgagtggagggaaagggtataagagggtatcaatggtagtgtgcgaggtacgggaccgaacgatgtgagacgtttatggcttgaccgaagtcgcaaatgggagatcgggtattggtgggtggggtggtaaggacgccaaaggaaataaaacagattatgccaagattagaatctgaaggtgagagtcgggtcgatttagaataatagaagaatgaagacgacgaagacgaagacgaataaggttgaggcggtgtatcgaaggggggcgaccgatattgaggtgttcgagcgagaaaggaacaatttaggaaacaggcgtacccgccaggcccattgcttgcatcgatatgggagtggatgggagtggatgaagggaagaaaaagtggactgggggcgtgatgatgcaccggggggggggggggggtnnnnnnnnnnnnnnnnnnnnnnnnnnnnnnnnnnnnnnnnnnnnnnnnnnnnnnnnnnnnnnnnnnnnnnnnnnnnnnnnnnnnnnnnnnnnnnnnnnnnnnnnnnnnnnnngggggggtggagggggggggggggggggggggggactaatgacgtaggaaaaataaaaacttggtggcttttttcttataaacggttatttccttcatatggtttgcagataattatattccataatgtgtcttgcagtgttcgaaagctgaccttttcagttactttgatttcctcattctcatagatattggaagtcgaccctgttcttcagccaaaaaaagccgatatgacgtagccctagttgtacctggattaccgggattgcggtaaacggcagccaagtccaagtctctctcccttagtccttattacctgggaaacttgaaatatttatgaactacttgtattttatgaactatttgcaggctaggcaagctaggcatccgcaggacccaatgggcatatctatggggtatttgggtgtctgccctaatagaatcacattcaaaaagcgactcgtggaacatccaaatcaaaggagaagctcttgcggtctagaccagagaattcaaaccccttatcccccttgatcagcctctgatttatggggaatggggtatcatacatagaggtcggatgcattgtcacgccttgttgcagatgcctaaccctgggaacgagaagatcgacccgccgacgtcaacggggctcctgtggcgccaaatcggctcgatgggggaaggattagtgcatggacggtcaagctccccttttccggaggatattctattcacgaaataactaatctggggtctacaatactttaatttgatatatattgggagtaatattgcagatttggcaattctcagatggtcagctgagattctcctgtcctatttagaataatacacacattccgttcttcagggctggctcccgtatctgcagtctagactctctaactactatatgcagttaccccgtgcggcgctataactagccggtttcatatatgttctagttaactataaatcctgaaatctctgttcttccaccgtggtagaattttacagtagctattattaggccaaacccatttgaagttgagatttagtgaaatgtacttcccgacagtcgagtaatgtccagtgtgacctaagttcaagtgcatgcgagtctccaggactacaatcagtgcttatgaaaatataacaacccatataaaaagccacaacgccatgcaatcatatccttatttaccagagagttccgggaattccgactccaagtccaagtccacggactgtacaggctctcggttatcgctgccgacatcggaggactcatccaaaccactccgaggattcaactccctttgataaatcggctgttcgatatccttcaaacccgaccccgtggggtctctccgaatgaggaagccctgcacgcgcgcatcatttgaattcatctgtttgacggtgctgtctctacggtcccgtaggacgcgcgccgacttctcgttaacctcacgtagtcgatcagtgtagccagaattcatctggctgatccaggatgcttgaagggcgcccgcaaacagcaccaagaggattacaagccgagagaaggtgcgctggtcgacaacatgctgctgcggcccttggtggcggttatgccagtcctcccaatcttcccatgtggcattcgcgtagatattcgggccatgggagttgcggtccattgtagtatccagtcccgcgtggatccagccagtgccatttcgatcataggccgctcgtttgatcggatcagaaaggagatcatgtgcatcaaccacaattcggtagcgctgcaatcggctttcagcggttaattgattgaagagaggatggtcatggagaggtcggtcggggtggtagatcttaacgaggtcatagtaatttcttttcgaatacttcccggtgcggggtaaattcaagacatcatagggggtgaaagatggattgctcggccatgagtagttctggtgtgggaactctgttgcggtggcatagttcctgcttttgtatggtgcctgcagtctatagcttggagagattctggtcttgaaacgaggaagcggtaagaccgtagtcgagttcaaaagtcgcaggctttcgccaagaaaaggattgatcgtcttgaacattttcacatggtgtcactttaatgttcacgtcgaaatctccgttgcgctgatgtcgtaagttatcgtgagggtcaagtggagtggcggcttcggggctggtcacgtgtatgtagtttttggagcttaaccaaagatctccaactttttgatctacgcttgtctttttctacagtcacattgcaacagcaacaatggccgagtccaacgacgaccgcgtcgaacgctgccggcgctccacgaactcaccctcggatcagacccatgaacgccggcgacgagatgcgccccgagacgactattcgcgttcaagacgacgtggtgaagaccgccggaactctcgtcaggacagccctcgacggagatcatcccgtagtccatctgaaaggaccagcgtccgaagtgatcgtgctcgtgatcggcctcgtcgcgagcgcagagagcgatcaacaagctcagctggcgaagaccgccgcagacacagacaccgcagccatcgataccgtgacacccgccacgaagacgaaggacgagtgtctcgaaggcatcgagatgcgcgatcacgctctcgctcaccgcgaaaatcacgcagcccctcaccgcgagcattggaacgacgcggccccctcccctcacagtccgacgcattcaccgacgtggcaaacccttcagatgcaccagcgccagaaaaacaaaagccaaacttcaacgctactgggaggctcgcagccgaaagcaatacaattgtccagggtggtacgaaaatagtcttgaaataccatgagcctccagaggcgcgcaagccgcccgccaaggaagcctggcgcatgtatgtgttcaaaggacaagacttgctagaaacggttgaattgagtgaacgcagttgctggctggtcggtcgcgagcgactggtggtagacttcccactcgaccatcccagctgctcgaagcagcatgcggtgctacaattccgatttgttgaaaagcgcaatgaatacggtgatcgcatcggcaaggtcaagccttatcttattgatcttgagagttcgaatggatcgagcgttaatggagagaccatccctggtggtcgctacgtggaagtcatggacaaggacgtaattcgcttcggcctgagctcgcgcgaatacgtcctcatgctgcctcccagttgagtggagctttcagtttggtttaaagcattaaagcgctacgggtacaacatgttcgatgaacggaatatgacaataatattacaagtcggatcataattgctgcaagcttaacctagtttttgcgggcagacaaggtcaaaatcttaatcaatgcggcacttggcctccttcactacccttccatctggcccatcgcctactttctcagtgcttcttctgccttgctcttgcccttgtctgcatactgggccgcctcgcccttcacctcttctcccttttcctttgcttgcttagccccgccgctaacagcatccttaagcttgtgggcggctttctctgtgggcaaattcatgttagcatcagtctctgcacattgaatcaaagtcatatagatcaatgagatcacattgaagacataccacccgtgttgatgcccttgactgctgcatcagaaacagtccggtcggctttcttcaatgtctcctttgtcgcatcaacaggtcccttgttgcatggtgccgtagctgagatggagcgaatggcctggaagccaggtgcggtctgtaccgccacccgggttctgaggagaggagcgaatcgtgctgcagacatgtttgtagtgtgatggaagtttccgataacgtgggaaattggaataattgatgaaatctttattgattttcccccggatcagtacaaagtaacttgtttaaataggtttggagctttgaaatgtacttgatttctacttggtcgcccccagctgttagttgggttggagacgtcatgagtatgtagcccagctcttacgtcgattgacagtcagttggtcctccaaacaggttatgtattccgtttgattcggtgactggatttcatacctgcataaatccggttttgagtatgtcatttttgtcattcgttgatcgacgccgttgaatgtgggggacagcgacccacatgtagagaacctcaattactaccggggaacaagaatttgctaaggatcacaacgattgaacaatatatctataactagtgttgcaactctcctattctaaatcacggaaaaatatgttggcgatgctcatcatcgtcacccgggaaacctggacggtgtatccaagagacggatatctgcatgtaggtcatagctagcttttaacagaacgcagactaatatcgaacttgagctcagaatatactccgtgtggctacagtacctgactcgaaaaagcatatatatcacccgtagacaagtatatagatcctgagatactccgaaatatataaccgacccaagctgaacttcttccgcgtcccggaaccaaggtatcctggttatatttcgccacacctagttcaagtctatacgcgataatatataatcgaaaactacggccgaagctcaatgatgggtgttagatgaaacttgaatctatctatatcttgcatttctttcagaggatggcccacttttaccgttaacgttgagcgctcgataaacaggtcttgtcacgcagagtatgcctggtaattatttaggactatgcttccatatgccaggatctctgttgggatattatacgattgtctcaagatccagcgcaaaccaaagttggtcaagactcggagtctcgtgatactgaggagcatagtatagacgcgtctctgtcctcatatatatcacagttgaattaaagaaaaccccattggggtagggtcttacgatatggaccacttaataagagcctttattggcgattagtctcattcaatgagccaagctaacagttgccaacatcaaaagggcaagagagttaacttgctttgtcccacccgacctgatatgcaagtatacaccgtagtgcgaccctgggatccaaactgtcggcaaagcatcaaatcaattacaagccatggaagatatcgaattgatatacagatgcataaatatagatttattcaatatcaagggcataatatgaaagcttactggttcttctggaaacaaatctcgggaatagatatatctataggcatatacaaatcaattcgcactatacgaatatattcaaggtggaaacttgcagataagttgcagatagcagagacacgttagatatagcctatgaatttgatagtcagagagttctatagtatgatagagaatatcaaacacgaactatgagcagatgtaaacaaagttccaaccttggaagtacccaatcgggggaaaaccaactggaaggtttctgtcgatgctcttcacctaaagttttatcttctccctctaccctttccatccactctttctcttgacacaccatcaaaacaacaaagatatttcttttttgccttctttttctgtactctggaccaacttgatccatttctggttgtacttcattacaaagtcactcactacaaatggtgtccgcagccaaccccagtcgcgttgacccctccgagaaagaggaggagaaagcattgaccaacgatgtttcccttaagcaggaaagcgttgcgatcaatgccgagcaagcagacgagcccaccgcgcgtgaagtgaccgagcgtccaactggtcccaaattggctttgattacactggcattgtgtctaggagtattcctagttgctcttggtacatttacactctcagtgcagggcatgactgacgcatattatcttgccctatagacaacagcatcatcgccacagcaatcccaaagatcacaggccaattccacagtcttaatgatgttggatggtatggaagtggttcgttaaagcacgaggcaacctagctcatcggtgtggactgatctttttctctcttttccagcttaccttctcaccacggcgtcactccagctacttttcggaaagttctacacttttttcaatgtcaaatggacctaccttgctgccattggcattttcgagctgggcagtctgatctgcggcgtggccaacagcagtctgacgcttatcatgggccgtgctgttgctggtattggatctgcaggcattttctccggctcgctcatcatggtggctcactcggtggcacttgagaagcgcccgttatacaatggctgtatcggtagcatgttcggcatttcatccgtcgctgggcctctgctcggtggggtattcactgataaagtgacatggcgctggtgcttttacatcaatctccctatcggagctgtcactgttttggtgattgcaatctttttctctgcgcccatccacaatgttaaacaaactacatgggtagagcgcattaagaagtttgacccaatgggtacagctcttttcctccctgccattgtctgcttgttgctagctctgcagtggggtggtagtatctatgcttggaatagctggcgtatcattgtgctgttttgctttttcgctgttctcattctcctgtttgtatttgtccagcacacacagcaagacaatgctacagtaccgccacgcattttcttccgccgcactatttggaccgctgccctgtacagtttcagtctcggcgctgcgttcctctcctctgtctacttcttacctatctggttccaagccgtgaaaaatgctagccctgtcagctcaggtatcatgaatcttcccatgctgatctctgttgtggtcgcctccattttatcaggaatcattatcaccttcgtcggttactacacgccatttatgattgccggtacagttcttctcgctatcggctatggtctcatgagcatgttccacacagacacatccaaagctgtctggatcggctatcagataattgcgggcgccggtgccggtttgggtatgcagcaatctatgatcgctgttcaggttgtccttgatattcctgatatacccactggaacagctatcatcgtgttcgcccagactcttggaggtgctctctttgtttctattggaaacaacgttttcagaaacaagctcattgagtatcttgccaagtacacccccaacttgaacccagcttcgattctcaataccggcgctactggcttgcagagtgtggttagcaaggctgacctacctggagtcctccttgcttacaataacgcaattacccagacattcatggtcggtgcagctgtggcggccgccagcatgatcggcgctttgggtgtggagtggaagagcgtgaagggaaagaatcttgctccgggagccgcataattttctgacaacttcttccagcttttttatgttagcgctttgaatttcttttaacggcatataacatatgtaactcgttttattgagatatcaaatgccaattctccttatcagccagtgataaccctaaactgccacccgtggacctcggggacctgcgcagctaacccaagacgtcctagcgtcctgttaaccccagataagcagcggagaacatcgttgacttcacaatatcttatgattctaggaatactgggggacaatctactccatgaggatgccgaccaagcgacggattttgtcgtgccagccgtgtcggcgcttgaagacacgatgcgaggttcttccaggttcgagacaatgtgctcggtgcatctctctaaggtcggcggccgaatataattcatcaacaactgttggggattaatctgacaccaaataggctcgaatgctctcttccgtccacatctgccatcactagcccagattcagggtctattgggagatcagataggaattccgcccagcctattgcatgccattgcgcagcccggtatttctaattacacttgtatagaccgaggctctaattactaactgaaaggtaccagtcttgatgccatcgaaacctcactctctgagatgaaagaattactgaaatcccaccttctcggcaatgaccggtcaatggcacgacatcctgccaatgagatgcgggaaacgagcagtaatctaaacccgagaaaagatatcaacgatagcaaagccactatgcacgtgccatcagaggcagatatatcggcaaccaccgacatccagccagcaccaatcacagtggtccgccatgttggaagtctaatcaccgagcccgtaacaaccggggaaaacgactccctccgaggaaatatgaccgaaatgggcttggactcggacagcttctccagtgttttccagcacggcttcgagcagatagcatcctggtacccatttccgaatgaaaccctgacggacctcaaacagaaccatcctctgctctttgccatgtgccttctagcaggtatccgcgcaacggctggcctaaatcgcacaaacttgcacataacccttcatacattggtcaagacccacttgggcatgaaaactctagatacgcccattgatctctccaccatacatgctatgcttatcttcagtgcctggagcttcgggcctctcgtgccaggtggtagatatattgatagctggctgatgagcagtacgactatcacccactgcatgctcagctttcctctatccgagcttgtgtctctcgtgggtttgtacgatgaaacaaatcggaacatgtgcaggatgtggattcaggcctcactagtgcacctgaagtacgtactctgcaaatttacaatggtaagcccttctaaaatggcaacagagctgactagggttcaagatatgcaattggcaccggtcggccatcagtggtcccatgcgagcgtcttcaccagtggacggagatcgtcaaataccccggatttgaaacattcgaccacatcattgccgcagagctcaagctctacatccacctgtacgaagcgatttatcacacggtcagttcagtgaccgaggcgtgggacatggtcaacagatggggccgcaaatatctcggaggtgagcaggtcaagttaagcgtgatgcggctatattcatattctgacattcaaaacacagacggcagcaatatactaagatgggcacactcttgcgtatctctcattttatctcgatgggagctagcaaagcagaatcagtccacatctcccgactcgctgatgcgcactgagcgtattaacgagctgaccgaaacggtcatccgtcatgctcagctggtactgagagagattctggtcctctgcacctccgacaccgcgtttgttagaccgacatacgactatctgcttaccgcatatgcgggcgtcactctagcagagtactgctcgagtatatcggacgtgcacgcaacatatacgttgatggaagatgtgcggacgcaggctagaattcccaagagcattgagggggtatttagttgggcaacgaatgtcgtgcagaagaaggcgaaggatcttttggattcgaaagtggcagtaattcccgatgacaccttttattcgtaccccggctcggtcgctgactgggcgccgttccggtttattgactcgatgcctgcttctgaatgggacgggatgaatggctctatgcaacacttttgaactttatagaagcgacttgtctattatttgacggtgaattaaattgaaatacacctttctctgagtaaatcatttcttcaagcagaaatgggctttccatgtgcgagttcaattcggtttcgatgccactagacgtacaagttaggcacatccagtacgggacgatatggatgcggatgagacgtacttttccgcaagagataggctcataaagcgcaggatgagtctcatcaatacacgagggcacaaccttacaaaccgtatccggattgaagcccaggaagaaaggcatcgagtacctagaagtaggctggcgattatagaccctatgcactgtagacttgaacctattattagaaagacgctgcaggaagtcgccaatattaaccacgagcgtgcccggtataggcctcgcatcgagccactcatcactagcagacaagacctgcaaaccgccagacatatcctgccacagaagagtgacacattggatatcggtatgcgagccgatgccgacatcaacattcgcattgttctcctcgagtgtattggctggtgcaggggggtagtgtatgtaaagcccgtctgcgccggggctcgtggtcaccgcatcgaagtagtcttctggcatgtctagagcgagagcgaagatacggattatcttgcgcgcgagcatgaggcgacgctggtagaattcaattgttgtttcgtggaaccccgggagatggctggttgtatcccatgcgaaggcatcctcgatagacagcgcgtccgggtcagagacggttggatcgttcttaggattgtagcgcagagagaatgactctttgtgatctgcggatgtcctttgtcagtcattggccataactatgacgaagatctctcgggtggggctgatagtgtttaccccttgtttcggttttgttaatttgggtagtccccaacccatgccatccatctgtgttgttttggatcttgcttgatgctagctgtttcttttcgatcggctggtcgaagaaagcttttgcttgggaaagggcattctcaataagctcttcggagatgccgtgatttttgatatagaagaaccccgtgctttcggccgctaccctgaccttggacgcgatggtcttcctcgcttccaaatccttgtcgatactagcgagatctatgataggaatctcatcctcagttggtgggcgcggaggagcagttgacactcggcggaattcggggccgctgagggtcaggagttcgacttgggtgtactcgagcagggttgtcatggttagtgcgacatatggccattaccgactcgacgatgctggtgcatttatccatgcctgttcttgtcttctccccgcactatcccctccagggtccagaggtcgaatccaccgataaccgtcggagaaacagacggcaatcgtcggactatcttggcgcacatgcctgtgtggttggttggaagataagccgagataggctcgcacttgggttacttggcttttgtttctgagatagcatcgccaaggacggagttgcttctctgcttgttcatgggtgttttgtaggttgccagtggacaagtgcggatgactccttatcagtccattggtcactccgaatggctaaataaccctaagaaagcacgatatatcctgcacgtactcctcagttctcatctcctcccccctttcttcaagtttcagagttcgccagtaaggtcagcactcaaagtcaaccatctttactttgacccttttctccactctatctctaccccaccaacccaataacaacctcaataatgtccaaactatcgcgactccatgagctcttactagtgaaaagaacccagcgggatggcatcgagcgccccgttgatatgctggataatgactctatccgaccgacttcagtaaaggatcgaacatggtcccaactcacctatatcatgttctggttctcggcgactgcgaacgtcagcaatctgtacacagcgtccacgggaatggccatgggattgaccatgtgggaagcgatcggatgctcgttcggtggtcagatcctcgccggtgccttgatggctgtgaacggccgtgctggcgccatgtaccgcattccgttccccgttctatgtcgctccagctttgggcattggggagcactgtggccgactttcaatcgggcggtcatgtcaattgtgtggaacggtgtcaataccgttcaaggaggacaatgtttatagtgagtctttttttttcttagtctcgttctttccctggtgagggaagcactgaccgtgtggttgttgactttcgtttctagtgtctttctccatgcgattttcccttctattgaaaacatcccggataagatgggatccaagtcggctttgacttcagcacaaatgatgtgtttcttcatctattggtacagtggctagtatctcaatgcttgatctactgctaactagtctccacaggcttgtcaattgcgcattcttagtggtgcctgtaccaagaatgaaatccctggtctacatcaaagtcgtcgtttacttcggcgcagcatttgctatgctgggatggactgtgtctctcgccggtggttctttgaagacaatcaatgcgccctcggagataaagggcacggaaaaaagctatctcatttttaagttcctcttcttgggactcgcaagttgtggaactttcatctccaatgcgtccgatctccagcgatacgctacaaagcccaacgacgtcctcatcggccagattatcagctttccactgtcgaacttcctagttgccattctaggtaaccttatcgcgtcagctagcaaagctatctttggaaaggtttgtactatcaaaagccttgtttagaactaaggactgatgaaattctctagctcatctggaacccgctgcagttcttggacaaattgatggaaggagagcgatacacctctggcaaccgcacggcctgtgcttttatttctctggcattcgtgtattcgactgtcttctctgccatttttgagaactctatcccgtaagtatcaccttctcccacatttctatgccatatactaacaaccttcagtgcgggtaacgatattgcagccctactaccaaaatacatttcaataaaacgaggattcttcatctgcgccggtaagaaaagaaccaaagactcaaaaaattccattgcctcgacccaaaactaacaaccaaacctactagtcctctcctacgcaatctgcccctggtatctcctcgcatcagcctcaattttcatcacattcctctcctcctaccaaatctttctctcagcaatcaccggcattctcatctgcgactactacctaatccgccgagggctactcaacattcccgccctatacatctcaagcccaagtccgtaccgatacttccacggattcaacccgcgagcattcttgacctacgttattgccattgcgccaaacttctacgggttccttttccagatgggcgtcaaggcgcctctaggtatcaagcgattctactatatcgcttaccctaccggtctcataatcgcttttgttgtttattacctgtcgtgtctggccttccccccgcctgatatgaagcaggcgtctggctggatggagcctaaggacttcgtggaggatcatgatgcttctggaagtgatgagtctactattgatgccgttgaccctgacttcgcggagaagggggctgttgcggttgctagaccagctggcgaaaagggttcgttctgatgagatatgtctcgctaggacttggggatgtgcatgttgcagcgggaagcatgattaatgatttggtgccatatttacttaatgtctacagtcacagcccatgtgcgcagtttgttcatcttatgatcaactgaaatgtattctctttgctactactgtttaggggacaaaacccgggctcaatttggctataaactatgcacagctaattatgcgtataattctactgatctagcaggtttatgaacgccaagaccataatttatgcaaacacatctcccatctgatgtagtcgaactacaatcttgatacaaagtatcgaagatagtaaatcaacccttccaatgaatctcctctaaattctatcttctaaactccgattgacgtcacgttcttaggtattacccaaacctcgaactaaaagaaactgagaaatgctaaggccacgcaaaaaaaagacagatgcaagattagcaagtataacagacaatgcacgcaacaaaataacaacatggtatgccaacaaaagaataaagacgaataaggataaaaaaagccaaaaccaaagcaaaccaaaatcaaacaccaatactaaaatacataaccattatgagaaccgcacatccaaaccagcatagtcaggttgcacaggggagcttccactacgcgcacgagtcccgtatgcctccagtcgcgaagccggcgcatagatttgtccctcatgctgaatcaaaggacccgacaagttgggatggtacggctgatactggtggggccgcggatgcaacagccgagccgattcatggagtcggagtcgtgcatcttgtacatcaacacggtgctcgccaaaatgcaaaaactgcactggctcgatctcctggttccagcccgagtcaggatgctccagtcgctcttccatggagccgaggtgtccgtgcgatgacgcgggcgggctgagggagatgggatctggctggagagcagcattgcctgccagaggtaattcggtccagctagtcccggtcaacatttgctgttgattttgcatgctcaatggtggatttaggatcatctcggcctgttggaaactcgggggatatcgcacgggttctgtggcccacgattgataagagtaggcggaagagtcacgcgacatcggctcgggaactgagcgctctggggctgaccccacgtgtactttggcattatatgatggcaaagctctgggcataattgcggatggatgagcaatggaagaaagagcccctggggaatttattgagcctggtgttaattgagacgattttctgcggtttggaagagaaacggagttgttctcatcgtatgggggcggcggtggatatggaaagaggaatggcacgcttgcagatagatttcgtggcacctccagatgtggcactgagccacgccgagagggagcctgggatccaggcgtggtatgtaaatctgccccgtgatggtgactgaacttattgaactcaggctcactgtaggttgaccgactcaggggctcggtgatcaaatcttcagacacatcatggtatagcggagatgtaaaggcgtagcccgcttggctgtcgagcgagtcagtggaatgttttatctgcaagtcatcattcaaataggctgaagcctgcgaaatgggaactgatgacgggcgcttcatcgtagactttacttctaacctccgtcgagttgccacattcgcatacgttggcatattctctttgttggatggtggagaggtgattgcaggctgcggaacgtcagcggacgcttgggaattgctagaccgacgcactgcagcaagtgcttgttcagcctccgaagctgacatcaaagtgccccccgtttcggcagatgttgtgcggcttgatgatccctttccttggatggaggacagtctgaccagtggggtatttaacttggtatctacaaagcgacgagggcctttgctgcgcctctttgtttgagtatcttgatttgacctttgctttgagtgtcgattgaccacatgccactccgctaagccggctgtttgtggaggactgaatgagggaggtgtcttgttaggtttctccgtggcttggctcgtttgcgacatggctgtcttaacttccccgtctgtttcataaccttcttcagattcgtatccagcttgcctgaagatatgtggagggaaaagctctaatctgaactggggaggtggtgtagctatatgctcaggcgttcccgctcgagatgattcaagatcactccagttgaaggtagagcggcgcgatgggccttcgtcggatgaatcgcggagggatgatgacgagctgcttgacctgtcgaaaaccgacttttgattccgtgtagagtattgcgaggagcttggagacacattatctatctctttgcttattatcttcatcaatcgtcgcaaggtctctcgtgtttcacgaacgatcagtggatggagattgatggctgctttctttggaaagagctcaagcagtcgtgaagcgtgagtttcgtactctcggtagtcccggacaaggccacagtcttcgtaatgagccattcgtcccatagcggcatcgtaggacgtaatgagaaaacgagtggcaacaatcagccaagtatcgaaaaaaccagggtcattcttgctcatgatgcctttgttctcctcgtccttgattcggagctcatcacgacagaacccctgcacgacactatggatcttgactacatcaaccacagatccaccccggtatatggagaaaaatccttcttgactgctctctgtcagggaatctgagagttcggaaacaagcttcacgtccttaggatcgctatcagagtgacgcaaagacgatctgtgctgaaagagatcggcatctgaaatccgttcaatcaaaccatagtgaatgagggttccaagagtagtatcgagatcaggatcttctccggattgggcgctggtctggatctctaagttcacggcggccatagccgctccaccgaggttcagaaggcccactggcacctggtggccaagaaacgagagaagattaatcaagtgcagcgcctgcttttgctgcaaccgaaacaagtcgttcatgatactcaagaaaggttctgcaagcttcttgtctgtcacctgagatctgacatgatacttttcaatcggtttacccgttgcattgagacggtgcccaattgcatgaattgccagaggtagacattcgtagttctcaactatctgggtagccttggccatttgctcgggtgtcggtcgtgtaattccaagatccttgaacagaagcttgcaagcgtcacccacttgcaaccgtgagatcatcaggcaatatggctcgtacagtcgtcgctttttgcgcagcgttttatcgaccgaggtgtatatgatactgcactgtttgctccagggcagaacctctctgaacttactgatatcgtcatcgcgctcgaaggtgacgccgtcgaagatgaggagccaatctttgcgtgtctgcagccagaggcggactgcattcacgtacttttcagtctcgtggtactcggggttcacggtcaccttctgctcaattagcgtggctgcttgtgcaatctcccaaaaacacttgtacgtcgattcacgggacttggcgtcaatccaaaatatgccacctgggtagcagtcacgttgagtaaaaacgtactgccgcgctagatgtgtctttccagagcctggaacgccggagattagtacggccattgtcttttccggacgcgccttggctttgaatagccggctgtgcagcacttcaagttctttcttcataccaaaaaaagtagagttaggatgaaagcctggaggtgtcacgaataggggcgtttctttggcgcagagttggaaaattccactgttccccagatcagatactggggaattccggccttctgtcgcagggccacgcggtagagataatatggattgttctaggatgaagtcagccagggtgtctctaaaagttgtgatgattctcatattgagaagatcggagatctgctagttgaggacatgagatgggagccttcctagtgacaaaaccaataaactaagtccaagaagggagagcacacagtgagttgtctgagaaagagtagagtggatttccaaatgtatctggccccttggctcggtagtgaatgggcaagtcatagagaagtaataggacaaacgtgagcaaactgagctcgaagtaaaaacaaataaaggcaaaggcaaaggcaaaatcaaaggcaaacgtggctcgctagaaatcttcatcgaataggaggctcctcaatctcatagtccctcaacgtaacggatacttccggtgcagggagaaggtatgaagccctaccggtttcgtttaaattaggcatgcttcgatttgccgtgtcatccacttttgctgtaatagtcagtattcaaaaacagacaaatcaaagaggtacactttttgagaaggacttaccgtcatagatctccctagccttggccttcttttcccggatgcgagatttcttctcttccgtccagcgctctgtaatcacagcaggggcctgacgtgagtatcgtagaatggcctctgccacaacttcataaccagccgcattgtcatcatcaaacttgcacatatggctgtggtcagcctcgatacccgcccgctcaacaccctccatgtacggcgcagctgagtgctcgtccacgatcacttcgcgggtaccatgtacatcagtggagcgtgtctcgtggaagaagtagatgtgaaatcggcctatgatatcagcgaaaaggctgttgatgtgctgcagtgtttcgttgttggctcgcagagctttgacaagctgcggagatgtctctatgaacttcttaggaagcacagcattgcaaatgttttgcaacaaaagaccccatttcgcaatatcggatccattgtggggtgtgccgagaaaaaggatgccaaaagtggaaacatagaccgaacgtagatgctctgtcttctcactcgagagactacgggagtaaatcagggcgcgcttcacaatcaacccccccagcgagtggcagatgaagattatcggacggttggagcagtctcgcagctagacaagaaaataatgtcagttctggagactccatatcagtggcaaggaagaaaaaggtggagatgtcaacctacatttcgattagcagcgagactggaagcaagagtctcagcatggctaacgactgaatcacgcgaagttccatctgtaaaggcagtgacgttggcattgtaaccgtaagtaagaattcggggacacagcgaggcaagcacgtctgggagaaggtcggtaggccagaagcaaccggtggtttggctggtccaagtgtcatgaggatggccgttgaggccgtgaacaaagacaatatcgattgtaggatggtcacgcggggtgtagatctgcgtcaagccaaagaccttgatggcctctggatcggcgatacgaggcttagacatggcaatggatgagacaatagcagagtcaaggtgctattgccgtaacatatgaagatgaaaagaaggggaaggagtgaagaatcagttcggactttggcttttataaacgtgatgcgggtgactggggtgagcgtgactgagggtaactggggtgatgtgcctcctctgacccaggtcacccggaccctttcagtcgatccatggggtttcggcatttatggattccgggtgacgggccgtacattattctctaccttttttgtgatgtcttgggtcttgcctattggtagttcaacccggggtttcttgcacagccctgtcagatcgggtaatctgccaggtaccgtgccactcagacctcgaggtacttttattcatagatattgcattttgcatcttgcatcattgctgagtatgccttgtttggggtatgctgccttaaagtgttcagtttaggatctcgttaccctgtttatattgtagcctattaatgactagggtgagaactatagagtatagacgagccctatagatattcaggcagaagtctaaatagaacaaccacggaaataaaagatatcagatccgatatacaagacaaccatcgtgaactttgactgattatgtaggatagtactaacaatgtagaatagtaacaatgtaggatagcactaacagtgtaggacagcgctaataatgcaggacagcgctaatagtgtaggaaagcactaacaacgatgatctacgagacatagtagttccagtgcgccaccgactcatccctccggttcccacgcctctaaaccactggaagtcgagtaacaatgccaattttcttttctgtgaaatgtacagcctattgttcccaggcgcagttgcaaagtataggtagttccgcatggcctcaccagatagcctgacagctcctggttcttcagccttgattatggccgtttcagaaaaccaaggagtgatctgcaatccgttttcatctataatttgaagttcaatcaaggccatgtcgcattgcatcgacccgaaagcaagctcgacagaggctcctccaaggaacccattatagcccagctgatcacattgtaacgcactcaagtcggtatcaaagagtgtctgcacattactaccggtatcgttggcgatagggacatcgatagttaggtttggattgccgccaaacaacgccgggagtctaacccttgcaaaaagctaataaatcagctaaagtagatattagtaaatatatagtatacctgatgcatagcattcccgggataaaacccataagaggtcgactgcgccatctgcactagtgccggctaggtattatagatcaatgatcaatcctaggccactatagtaccttattgttttgaggtagttacctggggaggactctgctgcatcaactgatggaaaattccctagagtggtcaggaattattaaaatgtaacgaaggtagaaggtagagactaacctcggcccatacagcagaatgtaccataattggcggaaggtcattaaggcgaggcggcggatccatgatctgccccttgcagatccagatcgtctgctgagtcctgaccgggaaagacgagcggcccgagttccccagtctcatacattcggatgagtccttcaatattggttctctggcgttgtattttgggggtcggatcttccaggaatttcttgagctgctcaatccgttgctcaggcttgatgactaggggattcggacagaatgggcgtggattgaatgggcgtgggctggcatcctcttgttgcgccattttgaagacttgataaccgaggagttaagtaattctattcttggggaatagactgaagagggtatcaaaaagtgtagagggaaagatagagttaagagctggcccctcttttgttacataaacggcacgtgataactaactaactaactgagctttttccgtaacaccaacgcacgtacgtacgaccctgtgatttatacttgcttcgcttcgctccgcaatcaccatttcctacttgcagtcatcaaaatctttctttcgcctcacatgttacttctatcgcattgcccgcatgatcagaatcatccctggatgtccacatgatgtcttggtacgtacataccactcacctcacgtagtctactcggtctatttagtctatttgaatccgttttacttcttccaagctcgcaatagaaagaatctaaacatgaaatttcatagaattacaggacctgtcattttgataatatagtttacctagttaagtagaccatcttgttctacatatatcacccactcatccacacagaccattacctcccacggaacgccggcttccgcttctcaacaaaggcgcgcagcgcttcataccgatcatcagtctcaatgactccctcataggccgcattctccgaccgctcacccagaccatgggcctcgacagcctgcatcgccatcttgatagcaatagggccaccctcacagatatccagtgcgagcttgatactctccagcaggacgcgttcacgcgcaacgccatcctgtgtctcctcttcaggaagcacctccacgagccggtcacagagcccaatgaagtaagcctcaggtccggtcacccggcggccggtgatgatcaagtcccgggcgcggttcacaccaatgatcggaggcagtcggtatgtaccgccggcgccggggataatagcgagacgtgtttcgggaagaccaacgacgctagaggacgagaaaacgcgcaggtgcgtgcacagcgcgagctcgaggccgccgccgagagccacggacgagacggcggagatggtggggatttcgagggaagcaaggcttttgaatgtggagcggagtttgaggaggaagtcttcggtactgaatcgtcgcgttggatagttagctgcatatgttcgcgtaaattgaaggcttcaagcccgggtacaccgggcaccgggcaccagggcaccggggaaaccgggtatagggttgtttctcactcggccatgctcatgttggcgcgttccttcaggtctgcacccgcacagaatgctgcgtctacgttactcgctataaccaacgcccgggttggcccgttgcctttttcggcggcgatggcttccacatgcttcgcgagcgtgtcgagtaactcggtcgagatcgcgttgcgagcttggggcctgttcagctgcagcacgcgcacatgccctgagcctggggccgggatctggtgggtcttgataatgtctccttctgtgcttgtgctgtaacgagagacgaagacccgggcaggcaccgcggtcgcccggaggtgggcgagaggtgcggagaggcggacgaggcgcgatgacatgatgcttgtcattgtgcaattggcaattcaaaagatcgagggggtttacaccgcgatattaaaatgatgacagaagattactgcgctaaaaggttctcgggtggaagatgttctcggagctcgggtgtggggaaagctttgaatccgacgattaccgaaagcaacatgaacagaataatatgggggggtatcatgtacattgacaaaagtcctataaaactacaatattatatacacatagtcactggcagtattctgtaacctccgcatcactcggccagtcccagcctgtccggctgataaggtcgcatgcctccatgatcaggtccgatggtatccgcgtgtcgattcgttgctgtcgtctttccaaaaacaccctgatcgccacaagggttcgacgcatcattttgtgtccatttgcatgttcatctgcagcttctttcagtagatcagctgactgactcatccagtgcagcagatgcaacaacccttcgtcatctcctacggaccccaaagcccgaacaaaagcatgtagcgtggcaggtgatggtatttgcagcatcgagggaactttgagctgtgtttcggaaacgatatctgctgcaaagatgcttcgctccgcatgctccgaggttttggaggctgggagaacgagatgatcaaactgatgcttcaaaacctgcagcgcatgttgcatcaaagcgtcaatttcgtcatcaccctcgtttttagccttgagacgacggatacgagcattatggatcagcataaagctttgttcggcagtgccagggtgtctgagggcagcgtcaatggctttcgtaaatgccacacataaaatgcggaatccttcctcgccaagttcgacatcgcgctgtcgcatccagctcaatgctctgagagcctggtgccatcccagtatgcgctgaagacttcggcttcttgggccataatacccagtgaggcgctcgcgggtcagagcagataaaatgtgagtccaggcaggggtgtaaggagcacgtcgcaatttagtcaattggatcgcgtgccataaagcccttggatgatgccggtttcctggatgttccttggagtatgcgataaggtctattttcgcaccagtcgaagagtcggccgctatcaatgccgggaaacggtcggttgtgagaatatttcgattaccgctatccagactggatatatctgaatgtgtgcataggaacttgatgaacgatgcaaacaccaagtccggcaattcatgaaaagcttcaaggtccaaactgtggtatttgcggggcttggcccgcacgatggagagcacctctatatgagcatctgtcaggccactgcattggagataatacaatccagaccgcagagaagtagccgactgaagtagtaggctgaggaatctcccagagggccgaagcccttgtgcacgcatctggtcaagtaactcatccatggtaggcggttctgtgggcacatagataatgtcacgagcggaagccggttcggcgtgaacttcacggccatcccctggaagagcatgactcatttggtcaaaatcgcgttccatggcgtgtcgtcgatatattaacttttcagccatggcagcgtagatagcaccctttgggggtagcccatgatcctgataggagagaaaacacgcccaggcctcacggacagtcctcgtagaccgaatgcgagcaacccacatttcgtgatgattggacttagatccatgtctgtccggtaaagcttgcgggcgacgcatcatagctctcgtctgcactgtcgggctgtgatcggtatcccaaccggccaaaatcgaggatatgtcctcccacagacgatgggaatagccagcatctttcatttgtgaaagtacctgcatcgcacggctgaacatcccctcattcccgcgctgagaatcaattcctagtttctcttccttccaaggaggccatgacggagctttaagttcagcagactggcgctcttcggatgttttcttatgggccagttggactgcaacaactgctcgatatccctgtcttgtgacgggaaggacgggcttatgggttgccatagctcgaagaagctcaaattgcgcttgctgttgaatagatgtagatcggtaaggggcaatgttagccggtatagaaagtaaccagagacattcattaaatttgacggttttgacgcgatcatcatttcgcgtcaccaaagctgacctctcggcgttatcagcccttggggctgagaggaagcgagcgaatgcacgtgaaatagtgagaagtgattgtggccacactcgccgagcatgacggattaaacgaacgaccaaaatcatacaggtgccagaatcgatttgagggcggaagacctcagggggtagctcaagatcatgttcggcaaccccagaaggagcttcggcaatggggaaggtatgtccgctcatcagatgtaaagagtggattaaaagcaaacggaacgtgtgagcatcgagattttgctgtctcaaaagatggaggggaatgaaaggtggaatgtttgggctagcagcgccagatttggctctgtccgtttcgaacaaaaacagccgtaccattgcctcgtgggcattctggctcttcatgatccaggcccaagcagtcacatcggcggcatcgtagccacgcgatgataaataatcatggcttgtgcttctgaataccttctgcagagcgatattcaaatctttctccgtacttttatccgacacagacgaaagcaacgggtccacctctcgtatatactccccaagaataaccggcagtgacggcttttttggtcgaccaactgtcctcaactcgttctgtgtttggagagaatatttggaaagagcccgatcaagcccagctgactggccgtcatatccaagggggtggccagtgtttcgcaaagctttcgagaggtattcggcgggcttcggtttcactctgatgctggcggtcttctcaagccttttctctctgagcgagctattcaccgattcttggagcaatgctgcgcattgttcgtcaagtgatgaatctgatcgctctttattgaagagattatccaaatgtgagtgttgagtgtcgattgcaagtgactcgggcacattgaggaacgccgtggactgaaacgaacggaaactgcctgggcttaggccagccaggaaattgcgcgaataatgtacggaaaacttggcgtcatgataaaatattgcctaggacatatcaagttctttagcactatgttcgatgacggggagtataagaagtcaccttgtataaacgactattgagcaggtctgctcttagccgtgatactcccgaaaggcttcgggcatgcttgagaactgatgacatccatgaacgtagtcatgggtgaaagtgcctggacgccacagacccattcaataggctcaaagaggtaatttgtctccgaagatgagaaaaagtcaagacattagaaaaatacaacaatcgcgcggcagaaaattgaatcacgtgatggatcgtcagaaagcgcgccattccgaaaagcgcaacgcagcgaacgttctctccagcaaaacagaaaaaagagaacagttgacctatttgttcgagggttttctattgtattgatcattgtcctaatactttggtctctattgacaattattcctgctccacattcacatcttttattgtggtgacgtgaggatttgatcttccctcccctcgctcttcgcgatccccatcttctctaagaattcgctttcacgccctacccatcgaggctacttggattccggttgctatccgaaccaaatattcacctcaacactaaatcgccagcaaatattaatttacacgatcgcatcctcccaatctttccttcaatcgtctgatttgtggaccccatcgatttgcattggaggggatcgcgtcaaagcaagtatcgtcaaccttgacctcggcgcgacttcacaaccatgagcgccgacgaagctggagacacaacccccatgtctaccacaaatagcgaacctcatcccgaccctgctactaatgcaacctctgggaaacggaagcgctccactcaggacgacaaaccgagcactgagtcaagtgctccagcctcgcgcgatcgaacaaatctccatgaaactcttcgcagcctgattgagcttcttctgaagtaagctttgatgaaagtatgctctagtattgtgctgacaggccgcagacatgacactgaactccaactcctctcttgccccttcccaaactcaactgctaagcctcgaacgaagcgcgcaaaggtttccggcgattcagaaacctccaacatccaaacacgcgtcaattcgggcaaatacaacacgttgcaagagtttctttccgacatcgaaagagcatcggctgctgtaattgaacgcaatcaaacacaggccaatggcgcgaaagaagatggggcacctttgaatgaggtggtgaaccggatcgcagcattcaagaagcatatgaacagcttgattggtcaatccttcgtcaatcaacccgaggtcaaaacagagacgatggaagacgataccgacgaatcatcagagcttcacgcgatcaacgtctgtcagcgcgaggataagcctgccctaacactcttcgggaacccatcgaatcccaggcagctattctcgagtcttcaaaaatcggtgaaggtgccgttgtccgaatcaggacctgagaagtttgttgaagtgcaagaggagctgcgcgaggtcgccctgcctaatggcatcgcagctaccaaagtaatccctttcaaccttgatgctgctcaagcatcgaagcgaacatttggggaagtgtttgcgccacgcgaaacattaccaaagctagaacctccgcgcaaacgatctcaccgggctaattcggccacatggacggatcgcttcgacgccactttcgatgtcaggacatttttgggagagcgtagcaactattgcctggcacccctcccttcaacccagtggcttcaatacggtggagtcacttcatcacctgcctactgggaccgtgtagaaaagcatgcagattcggagaatgttcatcgccatggagatcctgctctttggactggccctgattcatctgctttccagggtgtcttctcgtcatttgctccctcttacgacagctctggcgcgattgtacagctcgcttcgaaggacatggtctggtggggacaacggggtgcggcccgcatgaacaccctgctatcggtggaagcagacagcaaacaaaatgacactcagaccgcccagcctggcaatattggcgaacttgatgagagcattctggatgaaatggttgagtcattcaacgcccaagactttgctggagacatcacagaaaccgatccgattagtgaagtcgaaccagaatcaaaagagatcaagcaaatgcttcaggatgtttccgacttgctcgacactcttagttcctaccagcgactccgaagtctcaaactttcctctgatctccagctgcctggtcaacaattgcctgagtcgaatgaaacccctagccttgatctgggcgatgtgaacacgccctctgaagcagagacccttgtttatgataccctcaagtcaagccttgctgcagtcatcagcaacctgccaccttatgctgtcgctaaactggacggtgatcagctcgcggagttgaacatcagccaaaaggttttggttgacattcctgactacagtggtaccatggaaaaggatgacttcactttgtcacaagaaagagccgccgcattgctcgcagcagccagcgcagcaaatcgaacctcaaccccctccgcctcacgacccagtaattaccaaggctctcacagtgcctacaaccaacgtgcttttgcttccaatgctcgggctccgcctcagcccgggttccaggtcacaccgcagcacgcacggcaaccctcagttccaaatacatacacgcatgcttatggcgcggggcgtccaccgagcacacccagtcaacgtccagtcaacacccctcaatacgcgcaaatgaacccacagtacagccagggcagccaagctccccaataccagcgccctacctccaatggatatgcccaagtgtctccccaaccttatacgccacagcccaggcaaccaggcacattcaacgccacgccacaggggcgtacgccatacgcgactgccaccgcgaaccagcgagttcagtacccaggccagactccttcacaagctggctactcaaactcggccgctagtgccacatactctcgtagtgcggccgaacaagctgcgctgatggacaggaacaaggcgcaactagctgctcgacagtcaggccacagcccttcaacgcctcaacctcaagggtcggatgcccgtgcttcccaagaaggcagcatgacaccagggagcaaagcaaatggtacacccctatccacgtagggcagatatttgcactaatccaagcatgtggcattgtgttcccattcaaaaatgcgatttgtttctaaagatggaaactccaacattacatttctctacagtcggctttctgcttttgactttttgcattgttcttctctctctttcgtttccaattatgagctctgaatgtgatccgcgtccccaatttcttttctcccaactgtgtttttaattaacctcttgatcctcggttttgtatgactttactttttggtgttgtattatggactaagcgattggcgtggatggttttttttcaagactggtcggccggggtgtataggctgcctctgcgatacagctaagtcttgcttagagagttacttgtttctcgcttccgatgcaattcaatcaatatgctgcatatcagcacacctcgtgctttccatggagattcgactgtaaagggggatattgagaaaacgagctttcgaagcgttcctaaaatcatatctcatacagtacactgctatccccgatataaaaaaatacccatcctgctatagtatctcccagtccgctgtatcttctgcccaatgctcatagtccattacatgccaaacccgagatactcatctatctgccctatccaattattgaagtaatcaccggaaaatgaacgccatccctttcttccgtgcccagtagtgtgtacccatccaaccttcccttcacaaaaagacaaaaccaaaaccaagaaagctcatcgccaaggaaacacacaaaaaaagaaaaaagaagattcgtaaatcataagagttgatagcaggcagaaacccaactcacgggagtagaacatcgaagctagggaatgaacatagcagcaatagccatgaaaccgaagtatctagaagcaaaaggtcagtctcaaacgcagccagaacagagtcgaagcaatcatacatcgtagcacagcgccaaccatccctcgagtcgaccagtgtatcaataccagccgagtaattcgccgcaatagccgcggcggcaccaccaaccaccgtcacaacgaccagacgaccagagaactccgcaataagactgaacgctagcagtggcaacaggagcgcacccgatgcgatgattattgcgacgtagacgggtgctgcagcggccgatgcagccagtcgcggagtgagtgagaccagatccgcgtcgtggattaggaaccgcgtctcgacaccagcgatgggcttgtgctctctcatccagccgcgatagcctgcgatatcctgttccgaggcccgcgggagcgtctgtaggactttgctgtacgcgcagagggcgttgtctgcgtgctggtcagagggctactttgtgggatagcaatatgggaagtggaaggagcttactgtattgttcggtcttttggatcaaagcgctcatgagatccatgcggcggtaatgcagcgacgagtaagcctgggcctgggcgtcccgtctgcgggaggccgggaagggctttgcgccttcctgctcggctgtgctgactcgatgtatttcttcgtactcatctagcgtgtggagatcttcttccatttgggaaatctcgtcttggaggtggaggaggacgcggtggttgacggtctcgaagcgtcggtagagcggagggaagcttccgctctcttctgaagcggatttggttaggtgcgaggctagaagcccgtatcccgatggctcttgcgatacgttggagtctcgtctctttgtcggcgtggtgcggtgaagactatcttccgggcttcttgggggtgatggtgggagcggtggtctatggatcgcaccgttgtctcttggcgatccatggtaggtctgtggtcgggacagttctagttcgcctattcctggagaggtttgcgcagtcgagattgggctcggctttctagtgggttgtctcttccgggtgactaactgattgcctgtagaaggcgcgggttttcgtggctcttttggacttttcgatgctactgggggtgactgggtgactttcttcggggaaatgttgcctcctgagaccaacactccatgtggcacagtgtttgtccgcggcttaggagcctggatctgggtggtggattgtatagggcgtggaggctccggctcctcgtctgattcagactccgaggatgacgataacgaggatgagtctgaagatgattcatcgttctcttctaggaactcaaagacattaggcatcttcttcgactctggcttctttgggttcgctggagcgacaggcgcatttagggcttgtcttgacccatttggccgttgtgaaggtgaactgttctcgacagttttagggcttgcgacaggaccagcctgtgggtttgtagtattggacaccaacgagtatgtcctctttcttccatccttttttgactttctagtttggagcatgattatcggataagttcggaatcaagacccgattcatacaaatcagggcataccagggaaagaggagaaaaagagaaaggaacatgaaatgaatcgtagtagggaattcgcgatggaatcaggagaatagggactcgaggcatagcctaggggtggaattcaaggtctcagatcgagtgtcaaaaggtgcggaatcctaggaatctagggggggttgatggaaaatagtatatctccaatttccccgcgaattccatcagacattctctataataaaggaaattggtattagtattatcgaaacacgaaacgtcaggccaacttccaatgggaataggtttgtgtcagctgaaaagcccgaatggttatgaagacttgtaattcgtcacacgagtcagtccgggaacaatctgaagcaacttagaagcgccgggctttatttagatcgaccaatgataatcgtatcgcaaggagcttccttgtatccctgttgatcgcgattcaaagaaaccaagagatagggaaatggtgacgaattgccgagttgaacattctgaacaattcagtgtgggccaagttgtgacagcaaatcaggcctgcagagtctgaaatgcaaatgcatgtgtgtctgaacgaagcaaaggaacatgtatgcgctggtcgatcttccttgcatctggcggtctagcgaagtgggggaatgtgctgcagctatgtgagcagtgtacgatgcagtcggtacaacgccacctatctgctatattacgtgcatgaagcatgaagtgttaagaatgtattgacatggagttgagtagttatagagtgtagtgggtactaagtcagagggtaaatggagatcaagtacggagtacagagtatgttgtatagggaaggtatatatgcagtttcatatttttatagttttaaataccattattgagtttataatggcgatttcctctgtgtcacaacatacaatataggtacaacatcgtatatcaagtgatggcatctccgttatctgggctgcttctagactcacctgacgctttaagtatatgtcagcacggactctggaagtcacgtggcgcataattgatgaccaatcagttgtgacaacaatagtgatgcagtacgacaacactcttattatccaactctcaaagctctcaccttgacttaattcgccagattcctataaatttcatgcacattagcacaaaccctatagttgttaacatcagattttactttcgatccctgttgggctgttgggatcacactgtttctaccaagatacaagttcgtcgaattataaacgcaagattcacacccacgcacaagtcatcctcagtgaaacctacacgagtggcgctctagtagctatttacttctcagattcagataatcaaggaccgtggtttaggcggggctaaagaccaaccggagacagtttatgcgtcagccgctgaggtttcggcggactgtgaagcctttctgaggaaaggtagaactctaagtattatagacgaacctctgattgaactgctgcaaagatgaacaaatagaatgacagtcgctatttgttccagaacatgcagcttaccgatattctgagtaaccgcggggtaaagcatttacaaagacgtctataaagacacacatcctcctgaacacagcacttcccctgatataataccaggaataccaaaatgctaccactcatgaaaggcaaactaatgctctttgacgaagtagcttgggacaaaagcgacgagcaactagcaacatgggaagcaattcttctcaaccaagaaaccatgcagaagataaccacattaatcaaaatccaccgtcaaggcataacagatcaactcttcccgccacaaaaaggctccttcaacatggtgatccgcctacgattcctcgacggcgcctcggccataatccgcttcccaatcccaggctactcagtcttcccagacgagaaactccaccgagaagtaagagtgatgcgctttctcgagcgacacacagacatccgtatcccgcacatcctacaccacggcaccagcgacgaaagcccacacggcctaggcccgttcattatcatggagtatatcgaccataacgcggatctcgtggatgcgctgaacacacccgggatactggatgaagaacgacccgttctcgatcccaatatcggcgataacaggctgcgctcggtatataatcagatggcgggcttgttgctgcaggttgcgaagtactcgttcccgcgtattggatgtatatctaatgctgcggaagacgagttcgaggatgagtgggtggttgcgcaccggccgttgagtatcaatatgaatgagctggtgcaggttggtggtgtgcgagctggggatctgccggggatgaccgagacgtttgcgactgcggcggagtatttacttgcccttgcggagctgcatatgacgcatctttcgtcgcaacggaatgacgctattgacgatgcggaggactgcaggacgaagtatattgcgcggtgtttattccggaagcttgcgagagagggccgactatcttgggctggggaggaagggatgtttaaattattctgtgatgatctacgaccggcgaatgtgcttgctaactcggactttgggtataagatatccggggctattgattgggaatttgcttatgctgcgccgttggagtttgtgtatagcccgccgtgctggctactgcttgagcggccggagtactgggataatgggcttgatgactgggagtgggtgtatgagagccggttggagattttcttgcaggagctacatatgcgagaggatgttgacattcggcgtggggttatgagtgaggaaaatcggctttctagacatatgcgtgagagctggaataatggggggttctgggttagttatgcggcgagaaggagttgggcttttgatgttatctactgggcgaggattgaccgtaggttctttggagaaggaactttggaggatcggatcggattgttgactgttgaagagaggaattcgatggaggattttgtacagaggaagttggctgagaaggaggagggaggtttgatatgaagtttatatagggcataagttgtagttatagggctcatacaccctatggtcacgtacttccttggaggtattccattaatacatagctatgaattaaatttgtgtatattcacaatatcctaaagatcttcttgcacctttaggacttctagatctgttgatttcgtcatttggaatatcttcaattcaatttgaccacccgagctcgtcatcgcacgccccgagaaccggcgccattgcggggaaaccagccaccatcgaaattctttgcaactactttgtatatctagtatgatttgccttgctttatcatggaggtaatttgggtatttccttattcctcactcaactaatgtgaattcttctcaggtgccaaaagcccggggagctggcaggtcaggcccgcgtcgacgaacagggtgcctaacatgcaggtcccgtaaggtccgatgcgatgaagcgaaaccaagctgctccaattgcgatcgactatgtctactatgtctgtataaaccacgcaccgcacccggcgtgaggttgggttcatcgccaactcgtgcaaacaagactactgcatcgaataacacagcacactcggggagttcaggctcctctgctgcagccacgactgcatcccgctctcccgacataaacttctttaataccgtgctccgcgcagacggccacacaatacccgcgccaacaaccacacttcgacagctccctacagaccagggctcccacccttcggagtttgacatgctcgtattcatgggcgggattacttctgagctggaacagaagcacctggacctggctgccggacccgcgatgactttgaccgctagtccagcgtcgcagtcgctacgcgggacactcacaccagaccgtcgcattcttactccaaatacctcatcttcgggcagcgcttcagacatgccaactagccggggcagcttatccgatgcaggcggtatctcgtatgaggaccaactgctacagcactttctgaccattggcccgccggctgctctttttgcgccggtcaacatcgagtggaagtatatgcgcccagcgctgctggttcatgcacgagattccagtccgcttttgaatgctttatactgctacgcggatgttcataaagcgatgatggaagggaaaaaatggcacttcgcgcctaccttctatagagtggctagttcggagatccaagcttgtattcatggcgaggtgacggagtccacactcatcaaagtttttggggctgtttttctcttaatgatatccgaggtatgttctgcttagtcccgagatcgagcgaacgctcatattatttcagcttctctcaccctacggaatatgtaccgggacatcttatattcactccgggtaccttattctacaacgattccatgatcgtactcgacattggaccggtctcggtcatcttttggtgtcatggatcttactgctagatgtcaagtccctgattgcaggccgagatggcgatcctctccctgaactcggcaatatcccagaacatagcataacacaaccaccggatacacaaacttcccaaacatctcacataaccgcaccaacagccaactttaaacaggaggacatcatcgaagacccattcctcagccccaactacctcgtctacgaagcaatcgtaggcccggcattccgattcttcgtacaagcccaacaagtcgtacgacgcatagtctgcatcgacctccaccaccgcagccgcggaactctcaccgacgagttcgaagtactccaactcgcccacaaaatcggcgccgatctcgaaacactctggcacagacgcccctcagtaatagacgtctacggacggcccgaagctctaactgacatcctttgtgcgcctgtggcatcggaaatctgccgcacattccgacaatacgtggccaacttcttagcgaattttatctacttgcaccgcgttgcatttgcaatctaccctcgcacagaacgcgtcaacggcgccgtcgatcaaatcattcaactggccaccgttgactctgccgggccagaccatctgcccgtcagcttcttatggccgctgttcattgcggggctggaggctacggaggaccagcgcaagtggattggccacgagattcagcgtatggctgcggcccacgaagctgacgcggcaccttcggccactcgtcacccgaccgctgatagggtcctagtgctcgtggaggagatgacccggcggcaagatgtgtcacgcacatgggcagactcgaaatgcgtgaggcgggaaatgttttcggactttttcgttgtgatttgaacttcatgttcggcatgagaggtgtagagattttctcataaaatataatacgaagaacctacaaccatttcaaatattctaaaccgacccagatccaatcgctcgatatgacactttatctccgcccatacagcgtgatcgatgcagtaggtgtccccgttccttgcgcacatacgtcgcaaaacagatcgcagcgaccgccacagccccagaactgatcatcacgggatacctgaactgggccggcagcgggaaagcaatagtcgaggcaaaagaaagcatctcgaacacattctgcagcgccatttcagtagcagagaagcgggcacgggcatgttcctggatattctacatcacccaacaagtttagcacatgcacaagtcaagaatacggaaaagccacttacctcctgcacgagaaactggaccgacaaatcgaatccccaaagcccaatccgactcaaagcaacgcccgtaatcagcgcacccgctacgaactgcgagctagggtcccagaaaacgaaagccacggtggcagcagcgatgcagataaactgccaattcagaaaccacagcccggagcgaatcggaccaatccggttcatgaccataggcgctgtccatgtcccagatagctcggcgaccacggagccgatgcgcatatagctgacctccaacggggtgaagcccgtgtgcaacaggtatgttaccattgttgcgccaaaggataggactgttaggtagagcaggctcagggcaaaggatgctaggaagacgggacttgctatgtactctttccagggcgctagtgagcttgacaagcagcgggtatcgctcttgccatttgtatcatctgcttgtgttgtaggagcttgtgtcttggtcaaggccgggactgattggtagacctgagcaatggccaaatactcgaccagcacagatgcggtattcatggtaaacactgtccaaattgcatatggggttgatatgctgtcgatcaaggagatgaatactggtgctaggagcttgcagaagagatcaattcgtctcatagaggcgttcaagtctgtggttcgaagttagatattgcggagcttcagctagcttcagggttctcaccttgtcgagggacattgatactttccgagatcacgattgcctagtgtcaaattatcagcgacatctcttcctaaaataagattgtatatcggatgcatggaaaccagacaacccaaatacgattcctcgtacatacccagtcccgttccacagccaccgtattagccgtagcggccaatttctccatacaagccagtaagccctgcacggtgaacaaggcaattgtaagcgaccaagagtctgtagacagagtggccacaaagcataagcatgagatcgcgacagggactctttgccacactactcctttaattagccattggccttgatactcggtacatattgaagtatccgaaacgattccaacctaccaatggaatgcctcacagcaacgagccggtctgagcgatcaacttgcgcacccagccacgacgacagcgcgacggctgaaaacgcccgcactagagcgtatatcgaagcatacagtagtgtccccgggaagatcgaagctaggaagagtacggcgccgaattcaaacatgcgggagttccatgttgagagtgtgtgagatatgtataggcgtgttagtactgagtgggcttctggtgctgggctatcattttggggtgggccatcatccgccaaggtcggcaacagagggttggaggaattgctgatgtcttctgatggttgccggctaggctctgggaactcgctcccaagaaccatcttgaagcgctgctggcaatttacagcatgtatgcaagtgtcgggtcgaatgcttatgtggatttgacagcaaattgggcggatcagcaatgccgtgggtgggctgaggaccctcgtggaaacttttatatcgtattgtctatggtgttctatttgtacctttaaatctcattaggtttgagtccatccattgagtactacagttattttctatttgaaaatgatcgttaattgcagattcaggatttgcaataatagtatggtatatgggccaattcccaataaattctaatacacccgaacagcaaaaattacaagctataaacggtatcccactgtttaatccaaccacttaagtccttcgggagatgatgtcgttgtccgtcgggcaatcacctcgaccacctttcggcgcacaccttcgcggtgggcgtatttctggaggaagtagtcgatcacgggtctccgcgatgaatgtccctcacacacaacctttttaatctcatcttcggagggaagggcgaagtgggcataagggtatttagtgtaatctccctggctcagaagcggtaggcgggactcgttgtcggggatctcgaagaagtcgtccacaattttatccgagacatcttggagagtagcgggctgccactgggcctggcggggaggcttggacatcagacgggccttgacaccctcgacgaaatcagggtggcgcatgaatttggcggcgatctcgtgctcgcgctggaaggtctccgtgatggtccacttcttgccaagacgcatctggcgcagagtcaccttcagagaggtcggggagcggcctgacagagtctccaatgtcttttgtgcccactccttgtgctcagtttccttctccaaggcctggataatctcttccatggtgttgaatccgaagcagcggtcaatggcagtacgcagggtaccagccatgagcatcggctcctcctcaagcggggggaggccaagggagaactcagccatggtcttgttcacaatttccaaacgctcgcgaagctcgacgtggtcggggaaagtcagctcggaaagacgctgagtcacactgctcagaacactggagtgcaagtagtgtgtggcgatgcctgcgtacagagcctgaacacccttcaagcgctccgaggtcaaagccaggtatgtaccggtctcaccatccagacgcgggaggaagaaggaaccgccaacgtcggggaagaagccaattgtggtctcaggcatagcaaaaagggtacgctcggtcgcaattcggaagggagcgtgcatgctgaggcctacgccaccgcccatggtgattccatccataaatgagatgacaggcttcgagtatgtagcgagcaggtggtcaaggcggtattctagtgcgaagaagtccgctgatgctttttgtccctccactccactctcattctgcagggccagagcagcaacgtcacctcctgcgcagagagccttggtgccggctccggagatgaggatcatgtttgcaagatgagatttctcccactcctattcatccaacgcttagtattgtatgtgtctgaagttccgggtgtccattctaaccttcaatcgagggacaatcttgcgagccatcgagccgttgagggagttgagcttcttgggtcggttgagttcaacgctgcggaggccgtagatcgagttgaacaggacatcatcgcgctcatcgccggggagctctttggggatatcagatgaagtcgacatctaacaaatgtgagcactggatatcgggcttctctccgaatagggtacataccatagctgttgcccgaaaggcagggttggtcaccttggcgcgtagaggcattgctgaaggaacgcgcgagatccagctcggcgaggagacgcgattgaattgtcgaagtaacattagaactggaatacgacgataaccaaggaagggcgttatgtgatgacaatcaggtatttctccgctttccttgacctcgggagtttttcgctggattttctttccgctccgactctccgcccataaccgaccagctcccaggtacattcggcgacatcaccgcaattgatgtcaatttctaagtggtgtaaatgaaaatgggttcaaatattctaaaagtgctatgatacaaaaagtcagctaagtactgaatatgttgtagctccaaaaccgactctgagaagtgataacgttcgaagtatagatgatctatttgtacacagctagataatgccagaaaaacaagaaacagagaatgatacaattaaacgttgctccatgtggccttcatccggctaaagtccagcggatacaccttctctccgtttgctgaaggcgaaaagagagtgtccaccttcgccaagtcggtcgaatgcgaaagcaggatcttgtgcagtgcattcttctcaataatcaatcttgctgtctccaagacattcttcacatccaaatcctcgacgctgatagttcgtgcgtggttgccgaacttttcgaccgcatcagagaacatctcattcggcttcagtgtaacgaatgtagaccggcccttctgataccagccatgagctttgatgaggtttatgatgaagaacgggctcgcattctcattgatatcgatactgttgtcaacaacaatcaattcgccgcgtgaaagccggtggctgagggcaatacgccaggcttggtcgtagatctttcgtggcaaatcggtcgagaaatcacgaggatgaggtccgaaagcgacaccaccacctcgtcgaactggcgacatcttgtcacccgcacgcgcacgaccggagcccttctgcgcgtacagcttcctgtgactaccgtgcacatcgtccctccacttggtgctggcggaaccttgtcgggtgctgtcgccctcgtagacgactgcgcggtggaggatatcgtgacgagtgggcatctgaagtagccgccgggagtaatggactaaacgctggggttccaagttaggccaccggtaggtcatgacttgaacaggggttgggccccctggtcgttgcgcctgttggacctggacagcatccttggtcgccactgggggctgtgtagtggcttcggttgccattgagcgtgtaaggcatcgttgctgtatgattcgatacgctgtcagtaaatgcgtccgagaaccggatcgagaagaattcatggagtgcactaaccgtcacttgcttcgggcctgacatgagtccgcccgagctgcgggacagcagcctcagtgaccgaataacatcgttccctggcattttgagagtcactgggtgatcggcgtataacttgatgatgtccggagtctcgaatggagcaaaagttgatcccgggcggtaggtgctagcagaaccttggtactatagtacccaagtatcttttgtatgattttcccttacaaaagatacttagccgcataatacacaatatgaattctcttgtccggttgcattgaatcaagtgtgtatgtcaagtataatttaattgtagacaggactttttaatttattcgatgtcttgatgtattcccgggcctggataccacttggaggtcacgtgataggttaagtgaccgaacagaaaaagttccccgggaagacaacaacatcggatcctcaaggccaagcccaccataacctccaattcctcgaatcatggcccactgcgagcgggcttcgaagcctctgctccaatgccttcgcaatacctactctagaggcgtggctggagtccagctccaaacgcgagccttccagtcgaccgcgagtgttcgagatgccgaagttgaaactccggcccaacctttccacaaggcacccgatccctctcttgtgacgagtccccgtctcgaaagacgtttgctccgacagggaaccgcccccattggatcacgtcgtcgccgtgctgcactccaagattcagagaaccttcccttcgaacaattgccctaccaatgtttccaagaagcccggaagattttgcttgcggaccgcgaagagaaattgaaggagattgaaatgatgaggcaacgccttgccagacaggaggctttgtccgtcgaagaggctggaggagcaaaggcgaagaaatcccgtgttactgccatgcaattacacctggagcgcctcaaggttctggccgatattaacgatcccttggtcaagcgaaagttcgaggataatgaaggtaatcatctcttgatcaagtgatcaacctgggctgagactaatcgttcgatttctaccaatccaggtgacatgtccaagcccatctatcgctttttggccgaccgcaaatggcgcgaataccgccgcaagatcctggtccagcgtatcacccagatgaacgtcattcccgatgtcctccctcactgcgaccccgtcgtcgagacaaagctgtacttcggcaagcgccaaatccaagccggtgaattcgtcgaagcgagactcagcacgagcgcgcctaaactcgacgtgcaaatctttgaggctggtgaaaagctagtcactattgcagttgtcgaccctgatgtcccgaacgttgagaacgacaacttcgattataagacacacttcttggccgtcaacgtccccatctcggccacctccaccaagatcgatctcgcacagcttttggaagattcgcaggtggttctcccctggctaccacctgttgcccagatgggaagtccctaccaccgcctctccctcttcattatggagcagaaggagtcccagcctctcgactttgccgccgtcaaggccaaggagtctaaccgcgacaccaccctccttcgcagtctccagtcccgttaccatctcaaggccatcggtgctcacctgttccgtacccaatgggacgccacgaccctggaggtcatgaaggagattggattcgacggtgctaatgtggagctgcgccgcaagagagttgagcctctgccatataagagacgtaacccctcttcgttccgctgatcttgtttgtcttcaagccattgtattgtacaatttgatatatgtatgaatatgcacactgatttaatccctttcaaccaaactccatgcgtatgcttaaacaaaatggaccagagtgccacgcatcggtattgtaatccaccggtctaatataatgtacaatgtataacccttagatgttctgggaatccagttgcgccggttgcaacggattggtcacccatcccatcttcgacggaggccataccctggcaattatcttcccattaatgagacccatgggcactgggccgtagttcctcgaatccctagaccagggaagattatcgccggccaaaaagacatgaccttcggggacctgcacaaagtcaagtcagcaattgaatccaaccagaacgaagaacctataacccacctgaatcatatttccatccttgccaatactcgtgctaagcggcttgtcttgacagacaaaatccccaggcatgcccactacccgcttggccacatgcacgccttgaaagttcgggtgaccatatcgcacgacatctccgacctcgattcctttgccattgcggtggaggcgcgatatcatgagccaatcgcctcgcacgtcgaaggtagggtacatagacgggccctcgctgagctggacagttatcaggtgctcccagatcagcgcgcaggcgcagaaagtgctggtgccattgagcgcaagccttccaatggtgcgcagattggcagcctttattacagaccggactaactgctccatgtgtggtgaattggaagcataggattgctcagatcgagctgcatcaactattccgcggtcgggagctggtcatgtgactatttggtgtctttaaattcgatttttttgctccacatcctccccttctgccatcatcagtcaatatgtcctgtgtcttgaaccagcgattgataggatattgccgtcgcattggattttaatatccaggacccttccagccgtatcagctgctcattaatgtttcgtgggcgctgggctgagagggatctggaatttcattcatgtctcgattattcgaacatctctacaatatggagatgttcaaacagtcaatatcctttacatatactccccataccccttacccctacccaatcccttccgggatgtccgcttctccaaatgctagagcttgccgtcgccgaaatacataaccaggacgagcacgtgtggaatatgaagcaagatgaacacaaccagcctatcttctaataggttgtcccccagtgtgcctcactttgaccccatttcattatgggactgggtttttgaggcatacatagtggggagacatctcaattagacaatttattctcattttcggtttctcatgctccctatctctcgtaaccttcttaaacaatatggatgagattatccatgcgtcaatcaatgtgactttttgtaccacgaatcagcatctaacaaacatgtaagtaaactcgaatcaaagccaattaagaagcatagtacataccgggatgcttctcgaccggctcaatgccctccctcttcttcgccttctgctgatgatccacgccatacctcttgtcccggtcctccagcaacgaatccaaccctgcaggatgtgccaacttcacgctctcattcgatacaaagctgcccatcaactgcggctcgcctagaggcacaggatctccacgatcaacctgccagaaatgatacgtcttgccatagacaggcgcaacgtcttgcatctctgccgtctccgcagcttcccagatagcgtcgggcacaccagctggtgctggcatgaccagcatgccgcttttgacctcgaactcgtgcgtgtgccagagcttacgctcttcggtgggaagagtcacgaaaatccgcggcgagatcatgtattccacgccgatgaggcgggcgtttgccttggatgagtcgtagattaggcattggcggatatctggataagtattaatgcccagcacatcggtcattcagttgtgtttggctatagacatggctgttgtcacataccctctgttaagtgagtgcaatagtgatcggcttccagacatcgagttggatcgttggcgtaaaagtggaatgcattgagatgtgcgcagatttgctttacgggcgtgaagtcttggatcattgaggctccagtctcgagtactcgactcttcattgtccgcggctcgtctggaagttcagttccatcgttgcagcagctctttcccgagtttgacattttgtatatacgttgggttcagggttgtattcgtgaattgttgaattgttaggtgttcattaatagagtctcccataaactgggatttgtactgaaatgatgtaatccatgcttccattgcattgatgtcatgatgattgcggacttcctatttgggactgtttactgctacagcatatttgaaagtagctttatcattggtagaagtaagaaaacgatgatatgtagtcaaaatttatgcaggttgtctatgcggagtatattttatgttatccttaatggaatatatgcatataccagcttcctcatagagcgacatcacttgttcgagcggttgtattaattgcgcttctgatatattggacttaatctgccttgataactcaaggaacagtctccctttgctccaacaagtcataaattggagtttttctcatatcaaaaccgccccgaccatcaaaacggtgctcatatatcttccgttggcagtaagctattgctatatcgtgcactatgctccactcaagcaacctcgtgcctaaagccttattatcggcctcgagcgtctccaaagcctcctttacccacgcgacacaattccatcccggccgactctgtcggacaggcgtgttgcgcataatttcggctacatgatatccgtccaataccttgccaatcaggatacgaacaagcaacatgttgccactgtttagtgaacactcaaactcttcgaagtgccactcagagccccctcctaactttgggctctcgttcgcgtggtaacagaaacccgtgctattctcagtttcaaatttgggccctacaatcacggaccagtggtacctaatcaagacatatattagtcttgctagtgacttcaagctaaacagcgtcatgaatggttctcacgtgtcctccttgtctggcatggttactctgcctcgtcgtgcatggagcgcaacatatatccgatctttgttggcgggcattgcaagtgaagttgaccaagatggctagatatttgctaatgatcgattattgctgaaaggatggtcgtagtggggtcttctctaaatccagtctttaccgggctctatggatgtctttatatttttgtggctcaatgctaaaagctttctattttaagaggagcgtcggaagatctactgcaacccaagtcacatcacatcgtacccaacagcgcctatagcattgggtaaccaatatgggcactttactcggataggtgcatcgtacgttaaattgaaaaaaaagggggccaatggcatttgaagaaactccaaccaaacagaaaacccccgcgaataggactgggcgcatcataaaaatagaaattcgaatgcaattagcggctcagctagcgtcgaatcaattcttagtgtcgtgtcaatgctttctgggggtccctttgtcaagagcatcaagaacacgtctatccatctaagtgcctataaaactcacgagccagtctttctccatctcattgtgaggatcccaataaagggctttggccgacagaaatacatatgtggcatcaccatatttgaacgttgtggaataaggtcccgctagagaaacccgtttatttgcacaaatggttaggaccacggggtatttgctgtttgagggagatcgccatctttgttggctgcactccgccacgaaaagctgtctcgttgccctgccgtctcccggggtggatgagcgagctcgatcggcatagcccctatattgcggactatgataatggctggtgttttttctttcccatttttgtcacgtctattatcattgaaggatacaaaccagaaaaagacgatgaaaaagactataaagatcacaaaagggaccgaagacacaacacaaccggagtcattcccgttgagtcatattcatctatggccttctttccttctttcctgttccatatttcgtcacaaaacaatcaaattgcaagatgaaggaagagcttccgggcttgcaccttctagacgcagagacaatcgtacagcgcctgtgataagagtcaagaccgacaggcctgcctagtaatctagaaatccaactatcttctgttacagatgacatgtttgacgaaatagcctcttttttgtgcactatcgagggtgaatgaggatgttatccgcatagaaaaggaaaatatggaagtatctagagatatagggaataattcaggaggaacggaaaggatggagaaataatgttcctttctatatcaatcaaattcaccaacggtgaaacgaaccctcaaaccattactccctccactgtctgtctatctatatgccatcatcctcctcctcgaccgaactctctgtgacatatgcatcccacgcctcacaagtagaattcaaagtatcataatcaatcagggcccgcgcctcatcatacctctccaagaactgaatagcaaagccctccgaagtatgccatccaatatggcaatgcatcagccaagctccgggattgtcagtcttgaacgcaatggcaaggtacccagaggccgggagcatggccacatcccggcggggcgggttcgtcaagctcgtgtcatcggaggagctgtacgtgcccgttccctgcgcgatgacaaagaagtcgtggccgtgcaagtggataggatgcgggacagccagggtagtttcgatgacaacataggaccacttgtctgcggtcgggagcacaattacgccgctctcctcggtgaatgtcgtgtcgttattccagacttgcaggagtgtcgggttatcccagtatacttgcattgctgtcccgttcagctgccagcggaagtagctatcggagtttgtgcctagtgtgactggttcgctggagttgtagtatggttccgatgcgctctgggccagatacgggacgagatcagagatgtccatgtcgtcgcaactgtcggtgtacgtgtattcggtggtggtgggagtggatattgtgctgccataataaacgatgcctttgatattgtctgcgctgtcattgtcggagcaggcggcttggggaattgcgcgcatccagaaactgtcacttccggtggattggtctgcgctgaccacaatatcgtaccgctgacctagatagaataagggttagtaaggtcatatgtaggttggtagggaaatggtctcttacccatgccgatgttcaagatagttgtggtaaatggctcgataggtaccaagtccatagccatcaccgtcagagtatggttgtcaattgagaacttgaagtgggtatctaccgcagcgttcacaagacggaagcgataagaagtgcctgcagtgaatgatgtgttgaagcgatggcctgtctgggtcgttgaatcgtcatctccatacacattggtaccgttgatgagaccattgtctaatgtaggcgggccattggcctcggcagagtaccagagttgatcaacagtctggtgactccaatcattgaggaacaaaactcctttgtccacatcatagttctcagtggcaggaccgttgatcacaattccaccgaagacaccttcgtaggcttgcaacccaatgtgagaatggtaccatgatgtgccatattgtgtagctttccacttgtaggttgttgtctgtcccggagcagtagggcattgagtaatggatacaacaccgtcgttctggttggtatagttctggcggatgccgtggaaatggatgctagatccattctttgaggtcagactgttggtgacatgaacgataacatcatcgccccagtcagctatgatggtagggcctggaattgtcccgttgactgccattgctgcacgagagtagccatcgggagcaactgtgacatcttcgatgttgaagtaatactctctggtcacgccggtggtggggacgacatcgtagtagttggtgctcacgtcgtagtcgcaccaggtctgtctgtcactggcggtatttccagagcaagcatcccgctttagccttgtatgtttgtcgtgatggatcgaggttgcggaggctactccggccaggatcaaaagagtggtccaaatcttcatgattgcttgacggtcaagaatgctagcaatttgaattttggcggacagacacgaagtaaattcacaagaatgaaagtttaaaaacaaaaggaaggatatcagcgaatgtaatattgttagaaaggactgtcggactatttgtagagaaatattgatgctacgaactattcttatcaacatatatagatccccgacgctctatcattgtgacgccttacaaggcaaattggagctcatatccagtatcaagagggtcagtaagctagtgaaatcaatgacatctgattggacttgactttagcacgacacacacctgagggtgcgtaatctcaaagtccgacggagtccttgggtaacggatccacgtgccggatcgtgccgaaccatggtttgtctatctgcaagcctatttttaagctaattcgaaccgcttgaggggaagatgcacgaagattttctacaaatggactggacttgcacgattggaaactttgccctaatgcaagccaccgtcacgaattacgtggcatatagtatctaagataacaatagagagaaatgatgatttctgaaaactaccatgcctcaattgccacttacatgaagttgccatggcgagtatccgtttttgatcaatctctgtttatcgaaagatgtatatcaaccaagtaacggaacagatatggcccctctacgccctaagcagataggctcttgttctaattcggtgatagaatacaacttattttctatccacaatatagactatcgtcatagttttggagatctcaaccagattgggattaacggacgaactcagcccgacccaataatgctactgtagcctatctcctcttattccaacgagattgcgacataggctgcaaggcagtgtcggagataaagtctccgcttgtttcaagctaactgatattcttcaggtacctgacaggaaccaccacggcacgtcagtcaacgcgtgtcccggcgcgcggcccggactcatgcaccaacccaattttaacaaccccttagagactatgttttgcgatgaatgattggatactgcacgctcaccctaaatttcgactaagtggagctctccctgcgaggacgtaacatgcaaaaggaccatgtaactatatagagaacaataggatagtcagcttcctgtcaatcttatccaaggttaaacatctttctcattatctgctatccactatgttcagttcctcggtcttctgcacggcgctgtgcctgggagcgtccgtgtacgcttctgactttgcctctaggagcactcccggcgtgggtgaggagttcggactttatgcgtatggagacgcaattggtggtctctctctgttctacggaaatggtaggatcttaacattcaccactatctagaaccgtattgaccaggtgctaggcaaggctctgattggtgacccagccaattcgactgcttcgaacacttcaagtgtatactgtcagtgaatcctacaccctgcagtcatgaatttgtgttaatatgggacatactagtcgaacgttcgtccacggatagcacttggatcgccaacccgaacggaaccaccaatgcgaacgccagctggtctgaccagatgctctacattcccagttcgtcatcttcaaatgatgaaatgggcttcgcgtctacgaacgcgtcgaataggactacaacaggtttcatcttctacggacaatggatgatggtgaaatctgattctggcgaaatctcttccagcttctatattagagagaactcggagggcgaagggatttattccttgctgtggaatgcgtcggatgatgcaagtgctattccagtgtccttgcgtactgcgaagccgtctgattcttgagatattggttgcaaggaaaaacagaggttgtctgttgtgatgattagctttggttctatggaaagaggtcgcccttgtcaagtcaagtccaatcatagctatctgaaaaggaatagaaagttttatttcctatctggaaataaaataaatatggctataatctagatctaaatctagagaagaagaagaagaagaaactgtgatcaattcaaagatcatggtcatgcgatatcttcccaagaatgtctcttactctgtaactgacattttcatattaaaaacacttaactagattgcctgaaagcatgtttaggtaacgaccggcttctttgatagattggttaatggtgaattcgatgcattaccaacatgaccttattcccaaggttcacagtccgatcaaggtagtcaagatattcgagccccggttgttcttcctttgaaaggagtacatttaccaagtttgggatgctttcttcttggtaagccgaccatctggaccattaccaccattgaacgcaatgggatctgacaagctagtcgatggagattttcagcgcggccttactaccacgatatacctcttgctgttgttgccgatgcttccttgtccagacgacatcacaccgataagacctttcggagccacatgatgtgccagagtttcaacgacccgcatgaggctaagcgaattcgtgaccatcacatgtacaaaatcatcggtggatacatctccaattgtttggttgggtcacgatttgtgattccagcgttcacaaaaaggatatcgaatatattgcccggcaagcgcctatcgagcgccttgatttaatcaggttggcaaatgtccgaggtcctaatttcaacccggccgttgtgattgtctgctagctcgtggagtaatgtccgcgcccctccgccgcgcactgttccgacaacgtttcaccccttttctacgaattctgcgtagcaccgatgataaggatggtggggggtaaaatggagattgtgccgagttatgctcagacttaatataatttggtaggttaggctccttttaaacccagcaagtcggcttggcagtttctagtgttgggtttatctccgtcagattccctttgaagccggtgattctggtatctgtagcaggtcttcccatattaggaaataacccctgcttagccgtatcgcgacttataagattggattcagcgtcgagtgatggtgaaagagcgaaaatcccgttgaggggggtccatagggatctgccgttgataggcgacccaccatgtaggtcatgcagtgcagtggagcccgcgttttaaggcctccgtgtcaatcgtgtccaccctgccatcatcctactcttcatcaatgtggtcagtgtcaacatcgcaatctaattgttctccaactgcagatttcttccagcccatgagtacaggagccggagccgatatctaagatccgaaagcgccaggtaaagcaaccggagtatttcagctaggccctctctgtggacccggtctagcgctagtgataggtgctttgacccagggtctaccctcaccatatttggcggtgtgatgctggtgctgattttcctatgtttgccggacaccatggcaaagcgcgagcaaaatccgcagatcgaggagcataacaacatcagcatgattttcaaatattcatagccgtctttggcccgttcaaggcgttggccctgccccgctttcacccccgtcatcacctttactatgtgcatcatgaacgtctccatcaaaatcatttccgacaaggctccctaaatcttcaccattatcgaagtaagtcttgtatacatatcactgacaatcgtgtacgccatctctcaatatctggtggttcgctagatcgactatatcatgatccgtgaggcgacccaggcaaatcgctacgatgagagcggcaagctcaagttccactccctggaggggagcctgaaagagaagggctctttattgtcgactttttacacaacctacgagccgataaagacaagaaacccagcttgttagtctggtgtctggttatctatctttgctttgaagaattcccggagaagacttatgcctggcccgatttcgtccgtgtgactattgcgccgaagaaactactgctaaacaacaagcagtgatgtcaaaatggactctcttccaccttccccaaatcctagcggtgcaactgcgaagctgagcaccacagtcccgcctgacgttggtcgattcgcaatgttgatacccattgatataatcgcaaggttggcaatcgatgcagcagctaactcgggctctgagccccatatgaagtttataaaggaatcagtattcaacaaaacgctgataggatacttcgaaactgtccctgactacattgcctgaacaagttgattttggatggaggccaatccttacaacggcggtgtggacattcttctgtgcataaaagagggccaggaaatggactaccatagctcgggggaggatcaggatgccccagcgttggtcttcacgctcgtttcaattagctcaagggagccggcggattcctttcattgctcacaacaaaaggagagaagggggatggatggtgaatggaatggaaagatattcagggcttaccaacgtctaatgcagcccaggaataccacaatcattgaggaatgtgttttcgtttacgatatgagatcttttctgaataagatgatatcgtcgaactaaccaaacatttccgtgaacagtacgaggctcagactctgtctattccaggacgaaatgatgtgcgcttcggggatcggatagtacagcatccgattccgaaaggggattctgacgtgattttcagacaggagaatcagcagcagcaaagcagattttaattctaagtcagaagacacgcagctgctatggaacaagagttggaaataacttcgtgtatctgctctgggttcaatcgttggttgcttattcctactggccatttccatgatatggcacacgtacgtgagtctaaactacacacaacatactcgtgagaagctaaaatcaaccaggtgtaatgctgtctgatttcggatgcgcattcaatgccacatgtgaacagtgatagtgtagacactgtacgatatcccgcacccgatcaggttgacggaaccccatgatggagccgtcggttattgggagtatggtctaatcagattggggctgcttctgcagatattgattgggtctctctgggaagcagggaattaaacgggaggataaattgacatgatcgaattttgacatggtctctctggtcgttccaatatatatttccattaatgactgcaccgaagcttccatcgcacatcgatggcctgataattgcgtcaaggagaccagaatatgaggggaattcgactccatcgcacgctctcctcactgggaaaacggcctacatatactccatataaagacttggctataccaattttaagaaaacaagcctcatttacatctcacgatcgaagatcaaaaccatcgcaaagcctaaatatacgtagcacacacataagcggtaaaattatttctcgaaataaccacagcgcaacaccgcaacaccgcaagcccgcaatgaacaacaattaatgtgttattgtagaagcctcatccacaccaagactctgcactccacactccaccggcgatctacaagattgtattcgcgtaaagtgtaacagcccagtctactgcaatggtcagtgcccgaaatcaaaaaccaataatgcgctcatcactcttccaaagttggtaacacacccacctttattttgtatccaccactgtgtgtcggtgttggagcgggaaagaagcgggagagggactccgttggaccatttgtccgatatggcaatgatactcggttttagtgggggctgcgacttgggtaagctggtaaactggggctttcagggggctgtttccactgataatatagttttttttttcttctttcttttctgtgggtgatcctttttgggtgatctttagagtggcaacatggatttaactatggagtttgtatggagtaactataatatgcggaataacacataacgaatgttggtgcgctgtagctgcatatgtaggggagagttggaatggcaagataaagtactgtggactcggtgcatattgcagagtacatattgtaggcggcctgagtataaatatacatatacgctgtacgttgtacgctgaagatgtagacttgtatgtggggatacatacggaagcactgtatatcacatctgtgtcggcatgcagacccggttgtggaagataaaattgcagtgatggatggagaacgcggtgaagacagcaaagcgggtatatcacggagtcgaatcggaggtcggagtgcatgtgtgataggcaagattctgatgtctcaaaactcttgacgcgagcgcgggcaattacatttcttcattgggactagtttattaaactattatggagagggcaggagatgcttccagagcttgagcccctccaattttgtaaagcatgggaaaaggtagaattacaagtggctgtgttctaccaaggccctcaaagcgcctctaatctttaatctcatgtacaatatcgcttacggtaaattggcaatgtggtctacgacacatgataatgccgagaatcgaggctaggattataaccagtgatatgattgtgctccccgatatagccctagacatggtgtgccatctcactgcagttgcatatacccctgctatcagctgcaccgaacttcttctggcgacaggtatgtagaaggtcatgtcgactgttggacaattgtaaatagtaacacatagcatacggagtactccgtagtaaatagtcagttggagctacgtagtatacgaggggcagcccctcaggatcagcccctgcatgagtacggagtataggagaacggagtacggagtatggatccccaagtcattgattttgattttcctttgtttggaacaagatcagcgcactaaggagatcagcagctgagttatgaaaaaagggcgagtgcatagaccaagaatgtggaacctgggttctccgtactccatacccaggagaaacagaaaaagagcgttaaattggtaaatttgccggtgggatttgggaaggttttggagtaatccaggcggaggaatgcgattggcccaacctctcgacggagaaccacgttggcttgacctggccgaacctgggcttgaccgctaggcgccgttggttcctccatcaccagatgtgttcaccagtcataagttggacttcagataaggaatgtctccccctgctgcacctggaccttgcgtggcgtcagaaaccaacatatccgaggatggccgcctgcatttatggattgcgcccgatacatatcttttgactttccaatctgattgttgagtcaaagagtcgatgacgaagaataaccgtgaggctgcatcgtgcatcgtgcattagaccttacgtgtctgatagatgttgtgtcaccggaccctggtcaggtctagactggaattgaaagcactgttggaaatcgccctctgaagcaccgcacgaccagctgattccattgcagcctatcgggaaacggcagctctaagtttcaaccttgacgacatttgggtcatagtgtcggaggataatcccaacgatccgtcgagtcctagggccccgccaattagtgctgaccattggatttggggattgcgaccgaggtgaaattctttttctttgtacctccttagatccttcatatccctgtttaatccttgttaattcctgttaatccctgaatcccatcacatttcacatatcagaacaagaacaaaggagaacgcacggggaccagggtgacccggacgtttgcatccgatgctacaccgtaaggagctgatgacatggcgctaaagcaagccaaattgacctggcccgcagctcccgctgcattctttggagctaagaaggggaaccgagcaatcataacccccgagttggaacgtctggaaggatgaaggaagctgggatcggctccgccctcctgtgccccaatagtggaggggtggattcctgggcggtgaaatgggaagttcatcactctgtctagtggatatagaatacgcgccctttcggaagttactgtccttaggccccgttatggacgtattaggcctagttgcactataggaaagtcgatgatatgaggacaaaacatggtactgggccgtctcggatcttgcctggacatgcagggtttggagaatctcgtatttacgactttgtaaaggtacaggctgagtcctgatccctgatatgcctctttgtatgttcaaaggggggtgatcagaccagcattaaagaaatcccaatgtgccgctgttacggtgtgctcagtgcataccatagaggatcggcattttttctcatattgtgtcagcggttccactagaggagaactttgattaagacaaatcagacacatctgcctccaattattcctttgctttctttccttttccgttcccttttttaatgggagtgggtcgaaggtgtatgccgcgtgatgggcttgatgtgttttgcatcgagatcggctcttatttgtatattgtatattaccggatcttattgagctgatttataacatgtgtgttcctctcagaaatcgcaatttaaattgctatctccaaactatatcctgcaatatacttaaattaaagaaaaatagaaaacgccccctgaccagacacccgggcttggaccgggtattgatctgtttttggctttggcagagccctaagcacgatcagatccacctggccacgttgtgaatggctccaactactcctttttctgacacaaactggctttttaacttttctaaaatgctggcttcattcattttacttccacgttagttcacgatgccaagttctaggaattggcgcccatccgagactggacctgcaactgtctgttctacctgccatcccatcttcggaccttggaaactgcaggtgacatgaatgatatgaagactgatcacattctaagtatacatcacgtcactgttggaacacaatcccaactcaaaagtcaagctcaacggggttcaaccgcttgggatagccgagcttcccgctcagagcccaatttgttactaggccgtttttctagattgtctagcaggtacgtatgtacggaagacatatgtactttggtggcgcctgtgatagttttctgtgccacgctcccgatgaaacaggcccacaagcgttgaggaaatcgtccctacactacggatactccgtctgtattaactatattttagttgccccctcttttttttttctcaggtgatactagagagtgacctcaaaatgttgattcggtaaaaatgcaggtagcctaaacctcgcatggtccaagtttccgttttcaattcagccaagccgacctaagtgattggctgtgacctgatgaaagcgcgtcgagtagtctatttccaggctcggaacatttaaatgagaaaagtcaaaaaaagagtcagaagtatccgtaaatgattaacgaatatggtggcaatgatgcatctcctgcatcatgtactccgtagcccgggtagtaagggaagtcagcccatgcagagaaaatagcaacctcgcattcgggtatgcacggtccaaagagagaaacgacggttttgttctttaatctagactttgggaagggcgatgacgataattatctttaactccactttacacccctgtcgaaattcaaaatggcagtgcgtagatctctagcccatcacattgtaacccttgcgtaacgagcccggcaacgctatactggggagaaggagaacaagggaaggaaaggaggacaaggtgtcctgtagatgacttctcatctcgcattcttacaatcagcaagaaagagaaaccgactcagccttgggggaagtattgaccgcagatcgggccggatcgcgggtcaaccattcccagcggctaaagggtcaaggttccctgggaatttgggaatttggattttggatttctgcaatttgctttttcttacacgaaaagggaaaagaaaggaaaaacctcggaaacttaagaaaacgggagcgtctaggctgtgtgagattacttttagcataagataccgtaactatccccactatacacattatacactatattatacctgctctacctagtattcctgcctatcataccgaattataccctattcccccctcttactaggcctctttagcacttaatctatttaatctattccattcttccccatgttcgccgcaaaaagcatgttccatgttcccacaggtccgatcccacccccacttagctattgctgcactccggagtattccctatgggccctggtcgaaacggtggaactgccctgattcatggattcggttccaggttgcccttttgttcctttctgtctaggctcctttcgttagtgtcaacgtcgtgtcatcttagcatgtgcggtggcatcgtagatccgctacggctccctggattcccttataagcctaccttgcctagtaacgggatctgatcttcagaattaaatactctcacccgttcctgaacggagcatcggctctttctctttatcacatccactctccattcaactgcaccccacactacgtaagctatttgctgtctaccacagtgactatatactgacttgatccccctttagtcaacttcctctcttcaagcctttacttctttccagttttttatatggccgattattcctggcaacctcagcctccttcagctggctctcaatggcttccagacgatgcttcatatagccagtccaccatgcaagatctaacttgtgctttccctcgaccgaggcacactcgcgtcatgaagcctcgtagtgcaggcaacagcccttccacagcaaccaggagacgatcaacggtgaatcaaaatgtgatgcatggcctgcccactcaatatcagtcatccctggaagaagcccttctcgcctcagccgcccggaactcacgtccgatgagctggcatccttcatcggcaagaactcgcggcctttccaacccgtacatctcagatttcccttcggatagctatgccggtatggcagccgtgccggatcagtacctcaactcagccgtctacggtggtgaaaacatcatgtcatatcccatggccgacccttcattctcccccgactacttccctgtctacccaacaatgcaggaggatttcccacttccacagcaaacgccggctctcatggccggctcacagattgaccccacaatcggatgggatgtcgccaccatgtccgatatgtcaacgatgccacatctaggctccgataactggagcctggacatgctatcaatgggcaccaacatccccccgccagagacaacctgtccaagctacgtcagcgtcccttccccaggtgaactgagtggcccatcaacaccggactttctcccaatgcaccaattcgacaatcccttccagatcaccgacgagcccaagaagaccggaaagaacgaagaagaactggtcggcatgggcctctacagccagcccaacgggacactggcacgagccccgcagagtaaatcaggcgagggcctcaagctcgaagaaacattcaccccgtccgacgaagacaaggacagcgagacggacgcagaggtcgagatcattggacaccgcgaattgccacagcaaccgcccgcctaccatgaatacgcgtctaccattcgccagtcgaacttttcttccaagcagcccagacaagctctgaacctgctccagaggtcgttcttcttcgaccacgataatacggatcaacagtcgatgactgctgtgcagccttttgttggttttaatcagccctgcatgaattatgggtacgggtggatctaaggggatcctagcggagaaatttttttttctttcttttttttcggcatttctttactgtaccagcggcatagcgtggagtcatctttcatcatcttttttttctcggagtcggatacacggaaaggataccctgggacgagacttgcactagctacaattactttaggtgtactcgtacacaattcgatactgaattcacatcaatatttgctaccactcttcctatttttagtcttgcttaaaaagtactagtagtgttaatcattgtcatcatttcaagttctcgaagtatacaaactcaccctctgattggccgcggagaagataaacctcggcaaaaccatcccaaaggaacaacaattccccgaaaatatttcacaggctatcaacgcaaaaagtcaagcaagctaaagcttacgcatccggagtcgaatttaatttctaatttctcatttcgaacccagcgccgaaaatggcaaaggccattttcacagcttggaaaaccaagtctcagttgttggaagtgcgggatgagttttatcctccgtctgcgtacgctggaccggatttgcgttcccatggctgtgcagtggtatgttacatatatgcataggcgccagaatgagtgcgatgtccgctttgtatgtggttgctaatgatgtccggaatcaaaggtcgaggcttggaagctacgcggcaatgtaccgcaccatgttgaagctacggcgttgttgacagatgctattctgcatgatgatgcacagaggaattccatcttctcgattcgtgctacgtattctgcagctttctgtcggtgagtattgagccgtgcctgattcttgtttttaccttttatgagagagaaaacccagtccgattcccttgggatgatgtcttgaattcagactcctctttcacatacatatatcccgttttcaaataactaacgctccaactcagcttcgtaactggtcttgtggataccaagatccacggcgttcgccgaacaatgttccagcgcgccactgacctaggcctcccagcctccttcgtggaactccgccatgaagcaacccaccgcgagccaccgtcgctcgtcgtactgcgcaaagctgcgcagcgctcgctcgagtggctgtgggacaattactgggccggtgttggtgacgactccggtgcgcctgcattgacccatgaagatggtgcgtctgtcagggccgtcttgtgtgacgctctgcagcctctatccagcggatcggtggatcctgtgtccaagaagcggaaacgggatcaggctatttcggtagctatgcggcttgtctcggtttgtaatgtttcggcgactggggtcaggcatttgccttctgttttgcttgagcggggtttcttgatccctagaggtcgggagtgagtttgatccccccctgtttttgcttttgtctcggctgtgtgtcttcaggggtgcatatgttgtcggggagtacatgctgactgtgacattctagactcggggattcgatgaatgatacattcaaggaatggaacccggttctgcaaaaggtcgcagagattcatcctgcgttcttgagacatttgacggaagatctggtgaatgatctagcctttaaaaacacaaccgatatatcggaagatgcgccttccgaggcactgtatctgtggatcgcgcatatcttgacatctcctgcctgggagttccacaggcaatcatgcccgcagagctatgttctccgagcctgcgatgaaagtccacaccactggacaaatatgttgggagatcagttaagaaagcagactggcaagtccaagtcagttcttaccgctagacccgccaagaatcggatttcaaaacccaaacatgttagaaatgactcgcaatacgctccatcccagctctcggataagctgctggaacatggatggggattcctggagaaatgggacagtcgacctttgggtgtggtatcgagtaattagacgggctttctccaattcactcaatgtatacgctgctggcagcgttagagaaccccaaagccaatatttcccgtacaagatagctcactagtacggagcacggagtaaccaatcaaaagcggtggcattactaaagctgtgaagctatatgggaaaatagttcttccggatgacgttggtaatccgagatccacccggtcatgtatctctttcaagagctccccgcactattttgattcatcgttggtgatgaactttctaaggacacaactatttggaaccaggtcgcctctatttaggtcacaagccagagccatgcatatccaatcaattcctatgtgtatgttgatcttccggtccgtcatatatattaccaatcaacagtggctacttggtagtaatattgcaggaggaatgattgcttattctggattaattttacagggacggggaaaggtaacaactatgcctacctcgtgacggacgaggcgaccaagcagtcggtcattattgatcccgccaatcctccagagtgagttgcatctctataacgggttgaaactacatgagctgaactgattatgtggaactacagggttgcgccagagctcaagtctcaaattgcttctggcaagattgacctgacggccattgttaatactcatcagtatgtgatagaactttcatgggctggtaaaaagaggataaaatccaggtttgctgacatttgctgaagccactgggatcatgctggcggtaacgatgaaattgtatgcatgctttctcgggtcactggttgctatctcgggctaacattcgcaccagttgaaacaattcaagggccttcaagtcattggtggcagagactgcgcgttcgtcaccaagattcccgcgcacggcgaagaattcaagatcggagatcgcatcttagtgaaggcattgcatactccctgtcatacgcaagacagcgtctgctactatatgcaagatggagaccagcgtgttgttttcacgggcgatactctgttcattggcggtatgtgtatcattttcaataattttctgtcgagtgtcatggactaattggaaaccaggatgtggtcggttctttgaaggaaatgcgaaggagatgcacaaggccttgaacgagactctcgcggctctgcctgatgacaccaaggtttatgtagggttgccttttcgtgttgatacaagtctcatactgattcctcctagcccggtcatgagtatacaaaggccaatgtcaagttctgcattgcagtgtcgcagagcgagcctatcaagaagctccaggcatttgcggaccagaacacgcagacacaagggaaattcactatcggcgacgaaaaggtaagagctgaacctaagcgatattctagtcgagactgacaaaaatttagcttcacaatgtgttcatgcgtgtcaatgtaagtttcttatcttttgcccttgtataagccgttgctaattcaaacaacaggaccccgagatccaaaaggcaactggcaagactgatcctgtggaggtgatggcagcattgagagagatgaagaattcgatgtaaagatgatagtaaactagcgagaaaatctacgagatcatatgttgcgatatacttccgtagaaagcgtgagaatgaggtattccgaggcaagccggaactatgcaatccatgactacagacgaaatctccacaaatcaggtcatcaagagatttgtataactccgtagatactccggaaaatgagtgggactgtatacgtcataatcgtgccaagctcccggtccccaaatgtagacataactttcttatctcacgaacgtagccagagaagatgcagggagatgtatgcagtgaaaaataagtcgaatttagtgatctcagtcttccttgagctagtggataaaatttgagcttatgtagatgtagcttttctatagacaagccatagaaaagatacctcatccctgttttgtctgcggcccaccaataccgggagggtggggtataccaccagctatctacctactttctttcatgccacaaacacccttgacatgacacagtgacaaacagaaaattccaggacttctgcaaaacgaacaaggcagctatggatgatgtaagtgctggtggatcggagtgttgcagtgactgaccaatgccatcatagaacgatggaggggcgagtgataccgaagctcagaatcatttggaggtaagcgatttgactcccatcatagtaccatactaagtgcatatcgtcatacaggtcgtgttctatccggactgcagtcaccgtcgcaaatcctcccttgttatgatggacaagccgagggtccgatctcacccagctcaggatgacctgacgaccgcctgctatgttcactccctcattgcgagcgaatggacctcaccaccacaccacctgaaacatacagaagatgcgcaagatctggaagatataacacggacagtggacgaggctcaacccgtgacaaataccaaaggtttcgagccagatgacccggtcccggtgctcgatacggacgagaaagcgatacctacaattctcgaatcccggcatcttacgaaaagacagctatcagatatggcttggaatgtgcgaaagctatccaagaagctgggcagcatcaagctcaggctcaccgtgaaaactgtcttcgtggtcagcaaggcgaaggacgagtcgctggtaagcctgactcgaaagcttacaagatggctactttccaaggaccgcgactccgcgtacgtggtttacgtcgagcggcggctcgagacgcatccggacttcggtgcgttgcaactgatagaagacgagccctccgccgaaggccggctcaggtactgggaccctcagctcgtgcatgacaagccgcatttgtttgattttgtgatcacgctcggtggggatggaaccgtcctatacacgagttggctgtttcaacgcatcgtaccgcccgtactctcctttgcgttgggctcactaggcttcatgaccaatttcgactttgcggattaccagaagagcctcaataatgctttccgggatggcgttttcgtcagcctacggctacggttcgagtgcaccatcatgcgcagcaaagcgcgactaaacgacccacacgggccctctctatcaaaacgtgacctggtagaggagctgatcggggaggaaggggaggatacattgacgcataccccagatcgagtgcatgagattctcaacgacgtagtccttgaccggggaccaaacccaagtatgccttctcctacagtgctatgtgttaggtttcacaacagaaacagacacagctaaccaatctttgctagccatgtctcaaatcgaaatatttggtgacgacgaacatttcaccaccctgcttgctgacggaatgtgcattgctaccccgaccggatcgactgcttacaacctcgccgctggtggctctctttcgcaccctgataaccctgtcatcctcgttaccgctatctgcgcccacacgctatcattccgacctattatcctaccagataccattgtcttgcgcatgggtgtgccgtacgatgcgcgtacgagctcatgggctggctttgatggacgagacaggtgagtttgttctatatgcccttagtttggcacttgggtctgcatctgactgacacaccccagggttgagttacatcccggtgactatcttaccgtatcagcctcgagatatccctttgccaatgtcttacctcccggtgggcagggtgagggctgggtgcatagcatctccaagacgttgaactggaattctcgacaaaagcagaagagcttcaagtagctgaagaggaggacatgcttctttggcctgaccctggctctttcttcctcttcacctcttcttttatgagcgtatttggtgcctgtttagttcgatcacttgtattacagctggtggttcattgttgggcgtacatgctttctagtagaatctatgaaaaacgatatgactggggtgatggagtactagttgttagaaaataagaccaacaagatttttaattcttttagctaataattagctacaattcccagccatttgtttttttctttttttccaagtggacacttttttttttcgactaagaagctgcaggtccacttggccctataaaaaggccatcgcccggcccgaaaattcttctttcttcatcttcctcaaccacctcgctttcagagtcttaatgctggtcttgaactgcgatcttgagcccgacactttcagagtatatgtgaatagaataacatatactctacttgactgacttggtaagtttgcaacttcctttttttcttcctgcactgcattcccccagccaacggccttgcgccgttcgatgatgaaaatcttcctacattcgcagtttccacgctagccgtcgcttgaacccaatcaaggcggcattgagcggaatatcttccttggatgtctgagaactatttggctgttctttttatgaattctttgcatttcaactttgcagtcgagacggttgctaattgtctctcagaaacaggattccttcttggtcaaatctttctatcatcgacatcatacatcgctttgcagtgtgcagtctctagctctgcagctagtctctggacgcggaggtcactgctttgcgcaaatcggcataggatatttggagtgatgtgctgtgtcgagttgaagtcatagcaagaacattcagtatattagtatcaaatgaatggctgtttctacaaatatctcccaattcagatctttttctagtatctcatagccaaacctgtagtttctcagcccagaagtaaaatcttgcaagattgcacccgaaagggttgtgctccgccgtactgtatccacctatcgaccccatacgacctcaaaacctcccataaataactcaacttcaccagatcctcaagctctcaaatccgtattcctcgcctctcaatcaaattgcaacgccattcccatggcagcaccacatcgacatgccacgatgcaatcaatgagcaatggcggcatatcgtcaggtagcgacagaccacagcagcactcacaactatcacaacagtcccctgggctgcgtgtaccttcgaatcgcaagaccatctacgaccgacacctgaaccggactcgtactgcagaactcagtcgggcgagcttcgcctttctattcggggagatggtcacatatgctcaacgacgagtaacaggtatccaagatctggagaaacggtaagagacaaccccctaatccaatgcaatctcctccccagcctaaaacaaatattgccatgtactacccaacaccccatagctaacgacccctcttcccagattaaatgaacaaggctaccccctcggtctccgcctccttgacctcctcttctaccgctcaacctcaacttcctcctccgccctctcaagctcctctacctcctcttcacccccaaaccgacccctccgcatcataaccctgctgcacctgatccacggccccctctggcgcctcctcttcggccgcgccgcagatgccctcgagcactccgtgtccccggacactcccaacgaatacatgatcaccgataacgacccaatggtcaacacatatgtcagcgcgccccgcgatatgagcatgctcaactgcgctgcctatgttgccggcatcatcgagggtgtctgtgacgggtgtggcttcgagacgaaggtctcggcgcataaccagcccacggaactgtggcctagtcggacagtgttcttggttcgctttggggatccggttatggagagggagaaggtgcttgagagggcgggtgtcaaataattcatgggcttgcattcggattaccgggatatatagaaggctacaggctgatcatgtatgcttgttagcatggtagatctacggcgttttgagatgctcgagggtggttatggcgctcttagtctgcggctctttggtaatgtttgattccggcaccggcattcccttcacgaagtcatgcaagtaccagtttcgacggtcgatctgagggatttcttaccggttcttgaaatctgctgtgaagaacaatcatgtacaaaagtccttctcggccagaagatatcatacaatacaattcctccaggagaggacatgttacattacgtacatgtacatacatagaagggtattggcacattggttgctcgaaatgagatgtagaagcagatcccaccatacacattgtgatggactggcgccgtaactccaacctccaagcaggatatcaacatcgtccgttcaccagtctgaatcatcaagaactgtccactcgccgacgtttctcccgatcatcatagggcgatgggctccgcttccgcctctccctagaccggctccgctcgaaccgactcgaatctctatcatcacgtcgctcccgtcgaggcgaacgcgacctcgacctgcgccggggtctaacaacgctagcattagcacccgtcggcccgcgatccccatcatcaccaccgcgacgatcaggcataaaccgctcatccgtaacaccctcagggggcccatccctcctcctcctgttctccaacccatccccaaaccgcccagtatcctcagacttgagatccttatagcgcgtgcggcccttctttccaagcttcgtcatgtcgcgcacatgcatgtactgcggcaacgtatcacgattgacatcatcctcgaagcgcgcgcccataagctcccgccgatccagaccctccgcctcaagatccccacggaagaaagcacccttgtggaaatagcgctgcatgaagcccgtctggccgcgcgtagcatcgcggtcctccttctgcttcgcgatgaactcgctgtcttcgcgctcgcgctcctcggtggtgaggttccgccggcgctcaatctcttcgcgctctttctcgctcgcttcgatcgcttcccgggatcgctgcacgcgcttcagctcgcggagtgtccacgccgcgcgctcagcttccgggtccaggccgtccgtgtcgtcaatggcttcttcgtcttcggcttcgacgagctcgtcgtcgtcccaggcgcggttcgcgcttgagcgcgctatcgcttccttctccagttgatcgcggattaattggtctgctttttcttggcgttgtgcggcgcgttggctttcggcttctgctgctcgttctgcgtctgcttgtgctttcgtctggccggctgataagggtgcggtgttgcgcttatcttttttgatgaatgttggccggatgagcatgcggcgaggtgcttcgtcttcggaactactctcttcttcggagctttcttcctcttcctcttcttcttcctcttcatcgctctccggggtagttttggacacagtaggttttacatcgtcagtcgtaggttgtggtactgcttttggtgcaggcttgggctggtcgtcctcttcttcttcggtgacgaacccttcctcgtcgtcctcttcctcggccttttgggctgctactgcacaggctgggaatgagctcgctttaggcgctttcgctcggcgtagtgcctcagctcgtctgcgacgctcttgttctagtcgttcctcccgctcagcttcatcatcctcttcctcttcttcctcctcagatgagggctcctctgcgacagcctttccaggacggtagcgagtaggcttaacggggtttttggtcattccccggtgggaagatgggaatggaggaggcattgtgatctgatctgatatgtggaaggagggtggatgttgattattattgagatgtagagccccgtttcctagcttgcaatttaacaccagaaaattgcgccaggtttgctccgtaatatggtgtggaggtgatttgttgaactgacgttatcgaggccgaagcttttgctggatatatgtgaccacgtgatgatctgcaggagggcagaagtaggcattcactacattaactcggagattgggttcttatatctgggtagtctttctttctctccgctcaatctagagccaaataacccattaagcctacgtccacgtagtattttcagatatccatctcaaaaagtccaattagccagtttcatactaatttaatcaccacgtgaccacgcgtttccgcgcctcgcgtcgatcagccttacttattccccgccgttttccaacatcaacccgggcaacgaaaaatatcacgctcaacactctcaaattcgaagtctcaaccagagtggaaagcagccaatattcgaaaatgtcactccaaaccccccgcatccttccctctcacctccacgcctttcacccttccagcactagctcgaacaccgttcgcatactcggcaccgtcaccgcgctgcacggtaacacggggacgctcacctgcggaaccaatggtgatgtcacgctgatcttgaagtctgatgcgcgcctgcaagtgggaaagctggttgagattgtggggaaggtggctgatctagagggtggacaggtatgttccacactggctccggagggatatacttaatatctttgattcgggcttctatagctatgtagagtggatgctaatgctttgggtcttgtagggatacggaatccgtgtactgggctcgacggagtggggtgacccagctgattgcggtatgttgtcgaatgcctccctctgcgaggtaatttgggctagagactgacttgtgtgtttgtcatgaatctagattataagatttacgagaatgttgtcaatgcgacacataagttcaagagtatcttctacgactaatgggtcatgagttgatggacttgaatacatggccgtttttctgaggggtttgtcccgggtgtggtataaggctggaatataccaagagcacaagccagcctaattgttgtgacattgtcagtgccctccattagagcctagggagcagatatctgtttgaccgggcccgggatgtcgatgctgtcactgtgattctccctctgtgattccccggcttttgcattttacgtatgagattatgatcaaagcttctcccaataaaaattctacattgagctttacttataagaattgagggtggttggaatgtagttggtgctgtgactgcctaggtggctagccgtacaagtcttcggctacggagatttacacccctcatgtattccgtgggactcgtcaagtggcaagtttgaaaggtatcatgtcgtgttgggaccatctgcgaggacctcttgaaactgctatattggattcagaagaatctatcgccttaaggtgagatctctgaatggatgcattaatatctccctagagatgtctactttatatccaggcacacacagcttattactctagcctaggtaaacaactcaaagccacgcgtcttcggctacggagatttacacccctcatgtattccgtgggacttgtcaagtggcaatgagagccacgacttcaggaacgtccacgagaaagcccagtttgttgtttgatgcagacctacatggacctcatacatatggtaatgttatggtccctgtggtaggtgaagcagcatgtgctacgggtccctctgcctacactgtctcatggtgctacggtgagatggtggtcagagggatgagaggaggaagagagaagaagaggagaagaggagaaagtgtagggggagctcttttatattgtcacatcccacgtgcctgcctaaaatcgacggccctttgctcttgccattgttccctctcggttattggttgtcgcaggtgactatacggaaccctaggttacatatagacactgggttgctcttgccttctttacctctcgggcagggtcactggattcaaccggtgcctaggtaaatcattttgttaaagcaatctacctacaaggcagggcatgattattgtgatttgatttgatttgattccgtacttcgtactatcataagagctacataaaaagggtatccctgacaaagaccaccacttccacccaccaggcacagcgaatacagcatcggagtcctgtcaagatactccaggtcatcagtttgaacaaataagaaaaggtcataagtctcaaggtgcaagtcaggaaccgttggctgtatgcaacgagatctacccataaaccgaacgccatcgctaaaagacaacaaaaaaacaaataaaagaataaaaaagtaaacatgatcgggttgatatgtggcaaaacattcataaagttactcccggtctaagacaaagaaggtggctattgcccttcggtgtctgcaccagcgggctggctcttgggtgcgtcggtggtagcgagagcatccgaactgaagaaccccgagtcgggaacgataacatcgttgaagttgaagggaaggagatcggggttgaagttgtctttctcgttgtggtggtccgagaatagagcgttgagcagctcgttggcaggagtttcgcaagatccagcaggggaggcgtagtccgttggaagccactccgcccagttgtcaccagcgaatttggtgttctccagttcgaagaaagcttcggccttggcagcatcatcgaaaatgtcgagaaccatgccatcaaggggctcaaaggtctccggaagactgtcgtttgcaagctgtggtgccaaaggctgttgcttggccggggacttctgttgccgtggaggtgactgaggacttccgtgaagtgattggatacgctgcaggcgctctgccgacagtcgcgctggagacataatggagcctagatccttacgtttgttgaggctaggggagtttgcgggcaaagacaaacgcttgtcaatcgcgttgatccgcgggttccgtcgacggggagtagggcttgctgaatcgaatccgatggagggactttcaaatagatcatcgaggccatcactcggggtgggtgcaaggttctccttctgctgattcggcttgtcatcctttgtggaggcaatgcgagggctgcgacgtggagagcagctgttcaccatagaagaatcaagctccttcaaagggccttcattctgaggattattgaaaagtgaccttctcaaaggcttgggggtgagactgttggcatctgtcactggagcagagcgggcgtgcatacggctcattgggctagacttgatggcgcgtgacaatacctctctagcgtcctccttggaccaacggcgtcctggggtatcaaacggcacttccaactcaggatcaggactaatagatcgagaagactcgttgggagaataatctgcctcaccgtcctgatcatcgtcgtcgtcattttccatgtggggggtctccccatcgggatggatggaagacgcttcagtaggtgctggggaggaagcggaagacttctttggtgcggccttgctccgagttctggcagcagggcaggacttggcctggccgtctgcgcggttcctcgaaggacgctttttgttgttctttttggtggccggcttcgctgcccctggcttggtccatttgtcttccgggcgcatttgtttgaatttgtggagccacaaaccacaaggattgcagaaagtcatctgatcccaatcattatcgtcctgctcgagagcctttttgtaaattttgaagcttttcacttcacccttgtcgtttcggtccacgggatcccaatagagcatgggagaagacctcatcatatcctccgcaagactctctccgccattcaccgttttcacccaggctcgccgccagctggcggtttcgatggagccgcaattctcgcaatagggcggaatcagcccgttgagaatcgcattgtccaagcgtgcctttatattctttggcaccgccttagtcacctgcttcggcattgactttggcttcgaggattgtttcgactgcttgggattagaaccagctgtctcacacggcatgaaagtgacatccacaggcccagtaggccgaggaggaacaatggggtcactagccgggattgcacgaaacatttggggaacttcgtggaagatatgtggtgccggcgcgagtggttttagcgccaagcgttgtccaccagaactcgaagaaggcctcgatgcggggcgggactgagcggggcgagaagggggagcacgagataccgaacgcggtgcttgctttgcaatctgctccgttgagttatcatcgacggggagatgatccttattggtcccttgtgcggcactgacaatgctgactggagagcatggctgcacagtagaacggacagagcacttgtctcgagttatcccacgagacacttccgttctaggatcgcctaggggaataaccgagtcatcgtctatggtctcgtccggccctgcgctcatgaagccggagtcgttctccagagacatggtaggcaacacagggcttgatctatttggtaaccggctatcgaacactggaggagatgatggaatgttggaggatggctcgaagagaccttggtaacgagtatcctcgggagaggggccgccagcgtctgtggtagggatgtcatcgctcatgcagtacggagaactgtacgaagcgggacatgaggcaatgctaatgctcgacgactcccgcaacaagctagccgtgggtcggcttcggcgggggaaatcagacggccgagatatgggggtgggtggacggacgggctcttcgtgtgaatggtcgacggtgagagcggggtttacaggagttgggcggtggattcgtacagaggccgccgtgctggctgcaactcgaagcgaacttggctgtctttcgatgttcatacccgactttccgggccagcttgcttgatacaccttggccctcttccgggcgggggcctccgttgattcctcatcagcactgccgtaccctgactgaatggaccctcttcgggtgttgttttgtgagacgtgtgaaagctgggtctggttgtcgcagtctcgcatggaggcacttgaggatgggcgaatcatatcgctatggggaatgctctgcttggggtaggattgctgatgagctggtgttcgacatccaccaggtgttgacacccgactgccagcgtatgagtgtgaaggcgacaccgagcggaccgatccattgtggtggaatgtagcgaactctcgtggtgtggagccttcgctcaagagctggtggaatctctcaatcccagattgatggatcggggatccgatgttgtcgttctggctctggcttcttgaggattccaggagggcggggttttggcgaataaaatttgtccatgattgcgtgtcaaagtcgcctgaattgccattggtcaacttccgatgcttctgcatgctggctaagtactcactctgggtgacagttgggacaggcaccagccgtagcttgacctccaacgtctcttgggcacctttggagaagagaccactgagggggctcttgcaaactcggccagtaattatggtcttcgactggttgttgggtgtctcagtcgccgatgagaaggtggccagcaccccagaaagcatgccttgcccgacaagaggggtttcgaattcggaatagtcgtaggcatagacggtataatcctttcctaattgacccacaagctccgggctgaacgaggaactgtgtaagtatgccattttggtcatccggggaagaggaagtcaaacctagcagaaacgattgcctggatgcatatttttaactcgatcactccaaccggagtgttctcgtctagaaatgccgtttggatgtcaagcacgtgtggccaccgagcaaggcaattagttttattctcgttgtcgaatgtgtaaagaactttcactgtatgatgaccatgtttagctgccattcatcgccctcattatatcggtaatggaaaacatacgcctcatagggcggacatcgataccgtcctgagattccatctcatcagcctttgtctgtccaccatgcaagacggtggatcaaattctggggttgaaatgaatggtagaggctgaagggtattcaagtatggtcgaagtaagagactcgaggttcgaagatgttgacaggtagaaagaggggggagcggagcgaaattgtcgatcaaagaaagaaagccctttcactcaggatcgggaatgagtcggcaattattagcgagccagccgatcagcggtgcatatctaggatctcgtcgaccgggagaatggcaggttatgcaggagtatgtagtggcggggtctttttatctgcaggcctggaattttagcaattgtgaatcccctcgcagagggaacataggcatggaaaagcaaaaagcaattcttaccaattaaacagggaaaaaagagcaataatctctccactagctctgcatgagcagacaaaagtggaagagagacgagtgaggaaggggtgaggttaaggagccttgcatgcgcgggtcaagctatcacgaaagatctccaaacaagcgtgacgcgacgtgactgcggccaatcgcgacctcgggaaatggccggaagttggtgcctaaggcctgaggcgcctaatattttcctcaggcgcttgtgagaagcttcacgtgacctctgctctccgccaaccatcaagatgtctgaacctacagcatcttctgaatcgactgcatcttctgcatctcctgcatctcctgcatcaaccgcaccttctgattcaactgcatctcttgataccagcaatctttctgagcccaccatgtcgactgctcctgaagtccagattcagtatgcttccctatcaataactcttagctccattcagaaccaatcatctaacaagccgactagggaccttctgaacaagccgagaagcgagctcacgtaagtccactctttacaattgatttatccccttcccttcctatgcgacctttctcatcctgagttatcaatggtctcttgatcgggagtttctgattctcgagcttgtggggttcgcctacgacgcccgcgtctcggaaactttgcgaccgacttcttcacatcctcatgcaagctgcgcaaagtacatacagcacataaaactaactttacatcttgcattttaatagtgaatatgaggtctctctcgtcgagtcgcatgagctcagcgccggccccctgtcgctcctgctgaccgccacgcgcacccacacccaggtcctgatctcctgccgcaacaaccgcaagctgctggcgcgtgtcaaggcttttgatcgccacttcaacatggttctcgagaacgtcaaggagatgtggaccgagtaccccaagggtgtcaagggcaagggcgtgaacaaggaccgcttcatcagcaagatgtacgtgaaccaaccgtggacggatcttcgtccctctttgctatccttgaaacagtttctaaccttattgccttatctttaggttccttcgtggcgactccgtcatcctggtcctgctcagctaaacgcctaatgcctcacgttgacatgatccctgctacttgcacggcatctcgaacccatgaacattttccatgggcaagttatcatgtaatcgatctcgataccctttgttctttcttttttccctcgcgtgcttttcctcccttgcttctagtccccgccaagacacgattggctaaggggatggactaaaaagacctttcggcgttaagttctttgcacgggctcctacccgttgcttttttttcaaagggaatcctcgggcggcgtcaaattagggcagagctggttagcaatgaatcttacagaaagatcttatggatactacctttgtagatgcttgtaagctagtaggtcaccttcatccatagatagatcttgctttttgtacttcctcgagctcgtcagagatgtctcatcccttggacattattaagggttggattgttataccttattcttcgccatgtacaactacaagcactcaatgtatcaaccaaataagaatatcattatcatcaatgaccatatctatcaagagacaatcatgaacagagagaactcggggccggatatgccgctatgtatacgaagaaaccacctagagaaccaaatcctaaacagcctcagcaagccccgtcaaaaactgcgacaacccaaaagcgccaggatccggaatcttcccaagccactcctcctccccaccaacataaacactcctcccaagactcgccttcatatccttcgtagactcagtcccctgccgcgccgcctccgcagcaaccctcacatccccactctcaagcaacgaatccacaaacggcgatagcgcatcaataagcgtccgatcaccaggcttagcaggcgtgtatttccccagtgccgcaaacgaagacttcagcgccttcgcccacgtctccgtcgtgatcgccgtcggcgaggtggtgttctgcgccagtaagctgtgtgcgagcgcgttcaggaagatcgcgtagatcgcgccggatgtcccgtccatgacattctccacgacgatcacgatccgcgcgacggtgctgacaatgtcggtggttagtggtggggaggcgtcggcgaggaaggattggattgcttcggcgccgcgctttagtccgacgccgcagtcgccgtcgccgacgattgtgtcgtaccgtgttacttcgggttcggcgtcgatcacacgctgcaggccggcgccgaggattttttggagtatggttggatcgactgaggttgtttgggttagatttgtgttaagatggtgggtgtgatggaaaagcttacgctgtaggttgctgtggatgtcttcggtaagattggaggtcttcagatccacgggggccgcgttacggttgttttcccacgtagaggcactgatcggggcagaccagccgactgcctcggcgggggcgtcaagaagctcaagcatagtagttttcacgcccaggcctgggtcgacgagcttcatcagcgagatgctgaagccgaggccgttcagactggttaggaaagtgccctggatcacgcggaccatgttgacctggtagtcgtgctggagctggcggtagacttcatctgtgataccggccagctcgagcgggctaacaccgccgagattgttgattagcagcacgaattgatcctccggcttgcgggtcacgtagcagcggtctgggtcgttgtggtcgagtagctgtagaagcataccgcggactagctcgacgaggtcgaatttcacgcggtgcgagcccggctcgttgtggattcccatgccgacttcaacctcgccgtgcgggatcgtgtcttcgggtacaccacggcctggcacgtggacgtgttcgagtgatgatcctagtgagactagatttgcgttggctagctgggctagagcatagaggtcgtctagggagccactgatgaaggtatgttagcattgattcgatttctgtaaagtatagcatgtagaccatgatatgtatagactcacccagcctcagccaatgcaccaaccatcttcaaaatcaatacaccaccaccaataccgcgacgaccaaccttcccacccttctcgcgaccaacgccaacatcatcattgatagcaaagaattcagtcttgataccagcaacacgggacttctccgtggccataccgaagttcagcacatcgccggtatagttcataggaatgatcagcacgccattatcagtggggacacgatcgataaccgctctgcggatctgctcggccgacggcgaggcaaagatggtaccggcgaccgaggcatcgcagagcccgtggccgacgaagcctgcaaatgcgggttcatggccggaaccgccacccgtcacgatggagaccttgtttgctctgcggggcgcatctggacggcggaatatgatcttgtgctgttggtccagggccagagatgggtttgtgagtgtaagcgagttaagcgcagtgagaaccaggtggtctgggtcggcgaagaaatgtttggctgggaaacggtcagatatgtggggaagatctgggggatcagaggtggagcgtactctgcattgctgatcaaaagtggacagtttcgattgggtataatttgaattgaagagctgacggagtttgaggttttgagtattttaagagagtggtataatgtttctcgagtgtaatccaaggggaacttgtttgccactggggtatgaggcaagattccaagattccaagattctcaaagctaacaccagcgagaagctctcggattggatttgaggatctttgatggggaaaaagtgggttcggtcactgggatcttcaagactcagggtaacttgtatagccaagtatgttgtatatatactgttgagactcacgttgtacggaatatagtcggaagtgtgggagtacaggcactccctccctctttaaggaacccgagcatgtccattcatacaatcaaggacgtgttcctttctttttcccttttttttccagctcacatgaacatccaaggtctgatctgcgcttcggcttaccctctagggatatcccgccaggcaccgcattccagaaaggcgtcttctgtcgtccgaatgggcgttttcaccagagaacattcttggaatggacaattcgatgcatccagagctgtgcaatgtattctagtccactctcgcccgagtggactttcttggacctcaacctggtaagtatgccggcattcctggtgcaccgaccacctcttacttgcttgtatgagttatagatattgtagatgtattctggtatagttattgtagcctataggctttggtctcggctttgatagagaggtccctcttaatacctgcaatagtatctcaggccaatgccaatgtaaatacaaattgccactaggacgaataccgggataccgcaagtcttagtggagacatcatgagactaacgtacaaaagggacagccgaactcggatctgctgtcagatccaggactgtggggtatatgtatagctctaggtcatggggtggtcctttgctcgttgatctcgcagggttatgcttctccaatggggttcgtggatattagaagcattcggatactatacatccactatcattagtattccaactacctcggtgaatatgtatagcacggatttcctctttggtctacccccacaacacgaattctttaattaagggccatcggcactggccgagatcaagtattgtaagtggcttggtgagaccggagttactccgtttttctccaaaggtataatcaattgccggatcccccatactaaataatagtctccctaaataatcaaacatataccaaacactccgtacaaatgtgtgcattcagtgaataaagtacctactctcaacatgtaaaagattatgccttatgacacgtagctgtattgattagtgccttctttgcgctcgagatactccttctcgatcaacctaaaagtcaaaacaatgttagacacaataaccgggaacaacgggttgttagtaaggaggatacgcacttctcaatctctcccttaatatcggccggctgaagcacaccccgggtcttagtagcactgataacctccgcgatcagctcggcgtggctgagggtcttgcggcccttcataatgcgcacgatggcagcttgcgtctcgaaatggcggtcggcagcaacccgctcgtgcgtcgtcttggtttcctctttggtctccttcagctggatctggttgatcttgatgcgcatttgcttgtcgctgaaattcgcgttgtacgagaatttatcgctagagttcacctctttgcccttagggtccttggataagactcggtacttggcgcatgcgagagactggagcgttcgtttcaattccgggtccgctgtgtgtcatgttagggattgttcaacttttagagcgctgtggatccacttacacaatccggtcgcttcttggatctgggggtactgcatgctctcgccattggggatatcgttaaagagcagcaacacaatcgcctggaacgagctgactaccaggttcttctttccgagcgggaagtttgcagtcagctgacaatgcgccagttgatgtttccaggtgagcttgcgtcctgtatgtttgttgtggtagaacgtctcgaatctgctaatggagcgtgcgatcgtcgatggaatccgtacgggtacatcgggatatgtcggccaggaggcggcagagagcacgctaacttcgaattcgaatcggctcctgcgctcgtcctgctgtgaccgtctgaaggccgtcatttcatcgttagcagtgtccatatcgttgaacatggactcaaggttatgagtgaaatttgacccgcattctaaccaaacattagccaaagcgcataacatatggatcttggatgcgacaaaccgttcttcaaacgagttaacatgctcttttccgcatcgttgctcgcgcttcgtttcatcaaaagacgccgggcaagatcgttcttgtaaaaggcttcaaagacagcctttccatgtacgaatcggaagaggtcgagaacttgatcaagctgtcggtcaagctctgcatcatcggacatcaggcttacttcctctgggttacggcctggtggcagcttgtaaccgcccttaaggagcctatccacgtatttggcgatcatttcacccgacttgggattgtcggtaccacctgtagagtccatcttcttcccgtggttcataaaggtaccaaaggcgtcgcggaccgtgtggcccagttcctcattcgactcaaaagaatcggtgcaaatatcgtcaaccttttgcttaaattggagcaggtgaatgaccatgtcggcctccagatcttgattaaacacgatgccctcaccctcctcgatgatgtacttcctaaatgcaggcttcaattcgagactaagatctcgccggtcaagcaaaccgtatagttgcttcaaggcagtcttattgccggctcgcatcaagccaagcacttcgttttcgttggtcaacacgtccgttcgccgtgtcactagagtctcatccaggagattggacagtttgagcttcgtgcttcgattgaaagagaagagaccacaccgttctacctcacgttcgatcaactggtgggaattatcgacgtatgcagccagggaccctgctgcttgttgttgagaccactgcttcacaaactcctcggacttggccatgaataaaggctcaaagtcactcccatacacatcgaggctgtggaaaagctcaatagcatctctaagcaaacttgaatctgtcaatgcctttgtaaatccacctcgatcggcctcgatcaaatcatatgctcctttcacaatctttggcttcagactcgcatcagagaagatgtatgaccggaactgaatcaatcccatttcacgaatcaccggttgttctttagaatgcaagaggaacgactggtcgagataatagaagatccagcgaatagtaacctgggggagagagaccgttagctgtgaacctccattcgagatatttccttgccacacatactagcttggagtgccaggccgaccacgcctcaatcactatccgcaatgtaccgacatcagtgctacctccagctctggcgacaagattcgtgcgcattttcccgctgacgaactctttgcaccgatcctgaagcttcttagccaacaaagctgcccgctcctggcggcagacattctccccgcccttgtatagctcttctagcgagctctctggtttcctgtcatcaaaaatagccgttagagccgcatccaactgcgaccacactttatcgaaatacgattcctggttaagccgcggtccggtacgaaggttcttgacgacgagctttttcgcgccgctatgaggagaaaatgtgttttggcggatattagtattcaagccatgggatctgatgggaccatttaacccagagactccccgacctggcacgccattcttaggcggggaaccggaaatcggatgcatcttatgcgggctcgtttgggttgaggagcgtgagggagacgacgacagacgggaacgcttgtgggtttgcagatcaaggctgcggtcgggtgaatacctctgggagaggagctcggatatggattgttgcgatcgcggctgcgacggctctccttgatcagaaagcttcctcttgccgattgattggcgcttaccgctctgctcggtgtcgcctctcgagttctgcggcatctacccggttcagcccgactgggaatttggggcactctcaacaggctggagatgatgaacaggaaggaaagtggattcgggatgatgttgaggggaattgacgttgcgcttggctttggctccgcacggcgataagatacggagctattccatcagacatggacatcatcatcatggatgaaatcatttcggtgtatatataatgtactaacggatattcaaataaagagccaggtattattgataatctaggtgtgcgaaatacgatatggacatcataacactcgcctcagccattcaggtgtccgtataagaggccatagctacacgactacttatgtacgtatgtatcaaaagcgctaatgatcataaattcacgctgaaaagaagagagagttgtatctagcgcgggtttttaaaagagagaacaggcccaaggccctcgccaacactcactctcactacagcatactactacggaatacgaagtacgaacagggttagtcctcaccgcttgttgatcattgagcattcgcccaagagctgggcatatatacggggtattatatatatatatatatatccctaagttttgaattcattcctcgactctaggaataagtctatgagaagtagatacaatacaacgcacattgaaggccatttatgtatgtaattcatggtacgcattcaagtaatgcaacgctgacaagtacacgatcatcaatgcaatgtccacatgttgttgatgaggctttatcttttgcaaaagactgcgagtgtgtgcaatggaaccataaagaagacgtaaactcataaaaataatcaagaaagaccaatcaatcaacacgcggaggacttctcgatttctttcccataggactgccgcttgttctagaatccaatattagcttcttgcttctactgcattgtgcagctaggtaaccaagggtgacatacgatcgtcggcgctcgccttccttccggaacccttcaatgatcttggccatctctttgcgagacgcattggcatcgatcttccgtcctccgagactcatactcaccttctcatgtgcgctcgccataagcaaccgcttcatgagaagataccgcatgttcatacacacgtacacgccgcagtcgctgccgccgtcttgctggggcgaatcgttcagatgcaggaacctaatgggcatgtttaggaggtatccgaatttgcgagtcaccgtgtctgcctcccagacgtttccttggtatagcgagtcgtagtgaaatgcgatgcggtcgacgaccgagatcaacaggagggaccagtgcgtgcctccttctgcctgggagacgttacgacagtcgttgatgggaaggaagacatgggttgctcgagtgaagtccgggagtgcttcgcggagggtgcgtggatcgggggtttggaggatcatgaatgacatgctggggcggagaaggatgatattggaggattggtatcgtgaaagaaattcatgttcgagatatctagagcaggaaggtcgaggatcagtgccatagtactgtgaagtatgtcggaccgactctagggacttactcctcccagaatgagatgatctatgacacattagctcatgtcccagctagaaggattctctcgccattcaaacccacgttgtctgtgagccagtcattcttgagagtttgcatgtcctctcttgtcactgtttcttcgttaactacctagtccttttcgcgcttcggggattgattccatacatcgcacgtcgtaatctatgagcacccaaaggcgacctgtaagcatcccgtttgctattcaccaaggcggcaagatctgttctaaacttacaactcaaaaatgcatcatctgggttcaactgcgcaagtcagtaatcgtgccgctaataccgaatcaagcgaaacccaccttatcgccaaaccggccgcgcaccttgcgcaacatgacggcaatatgatatgtgcctttcagttgatcacaaaaccgaagtcaggccgctagaatatgaattccttgaaagccgcgggaagagaagctatacactgcgccacagtcgagaacgcaatacgtgcacggtgctaggctcctcagatagccaagccagaccccacaaatcgcggttatgataaacggggcagatctttgcgcaggatttgagagttcgggtgccccgcgcgcacaggaaatgagatgcaacctacaacctcgtttatgcagtggcaagcaaagccggatgcgaaatagacgtcggcaatgttcaagtaacagactcgaatgtgtcccccgtttctgcactggcggagtagaagtgggaccggtcggcaactcgggattgggcggcgcttcggagagggaggccgtcagccttatgcttatgggtggcggagaaggaaggcggaggatggattgaatgcttgaatgctaatgctattttcaattgcgcttatggacaatagctggtcgagtggtacagagtatgctgaggggtacgccaaggctgagagtaagtaagtcaggcagtggccatgcaagggaaggttagactgaggctgtgattttcctttggaatgatgcaatctcggacgcaggaacaggagggaggtagcgatgaaaacacaagagggacaaatccccaaaagaactggactcaggcaggtttgatcgggctgcgtcacatgtggggtcacatgatgggtatactaaatcaggacttatgttaggaagcattgcgaggtagaaatgtatgatttagataagtctgcaggatttattaaagaaattaattcataagaataaggggtatctaaacgtgcatcccagagctccagtagaagaagaggttcagaccatgagctgagatgagaggaagggaacagagatcgcataaaagtggaaaaacagagagcagatcgaagagatggaaacaaggccaaagcaattgggatggacagaaaagaaaaaccataaatcatcagtatgagatgacgccgaacgaaacaaaagcagatcaaagtgacaaagcagcaacattgcaactggtgtagtcgcctttgttttgccctgttcttcaaagggtatgattttgaagaaatatgaagacagattagaaaaagaaacattcaatatgatcctgtaatatcctgtagttagtatgaaaccgtgtattgtgtgtttttcttcttgcggatttgaaaaatgattggcgaatagatcgaaaagatggcgtgagattgttgattcaggtgctgagtcgggcaaaatgtttgttccaaatccagccaacggtcctagtggcatcgtcctgattgcgggcaagccaaagctcacccttctcgcctatgacgtcgaagatatccccggaggcgtaggtcagatagggatatccgccctcagtgcgagtgtcaatgtcaaagtcataaacactcgccgcgcagaacaacgccgcagggcctatgggaggggcgctgcgttccgggtgcccatttacagcagtatcacccggcacatccgacatgggcatggcggacgagaagaatcctgagtatcgatcagtcggggaggctggcaggtagctcgagtgcgaagagctattgatcacatcctcgaggaaaggtgtgtctaggctgagtcttggcagtctagggaaaggctcgatgtcgctggttctcttaagggcgggagcgctggtgacttgttgcagcagttgattggaagtgtctgggatgactcggctagatagaatggaattggctcggtaacggctgctgcggctggagtggctttccatctggggagactggtatgattggctgccgatgctgaaatcccgggaaacgttcggtgaatcatcggtcatagacccaggtcgcgtcttcgagctgttcaccgtagaaggacgacgaggcgacatagaattatgctggtcaccgggtgacagggggaccaaattgagggaatgagccatcatcgccccgttgcaacaacttagctcccccactcgtgcctccatcaaagtgtggtcactattgaagtcgctgatgagcctgtcaaggtcattggggaacaattccacatgagcaccaatctttttctgtagaacactgtaccacacagtttgaatttcgataaagttcttcagacacgctgccatcagtttggaagtcaacgcgtagagtttaggcaattcatcctttaaggtatcattcaaagccaggaactgctcgccctgctcgacggtcttcttgtcaggtttgtcgccacggtccttgatggctttgtagcgtgcatattccgggagtcgcttgtcgcgcttccgcatgacccgctggggtgcattgtaaagtcctagtagttcaaccatcggatcaatgaccgttttgcggacgacagcaagctgcaataattagtgttgattcaataaagaaacatgacataacttacatgttctgggagagcagtcgtcacaagctcctgaactgtcatcttgaactgatgccacttgctctccaattgtggatacggagaaggcgacatgccgatgatctcttcgatcgaatcggcgtactcgttgaactggttcacatagagttgcacatcccgagagtagctctcagcgtcacgcatgacaacctgcaactggaaatagccgtcgctaagtttctgcgctagcaaatcataggttttgtcttcaaacaagtcggagaggccaacttgctgtctaaacttctccgtgcggcgaccaaaggctttagacagaccggtacgcacatcagagtggttgcgctttcggccgacagcttgaccaacgaggtctactcgtttcttcaattcgttgatccgatgagaaacattcgtgacctcttccagagcattggaaattgccgcatggtccgggtgatcttttggcgtggactccaacaggtcgcggagaataagggggtacttcaagattctttgcaccggcttaacgagcaaagagtccaaatcccaggcggtcgtgagatccatagcacccttctggcattcgctcagccaaaagcccacctttggaatgcgctgcacgacctgaagtttcttgtttgcggcatcatggtttttcaggtaatcagtgtacaccttttccatctgcgtcatgtgggcgacaaaaatctgaccaacaaaggtcgcgcgatccttttcgagttccgacattcctgctgcttcggcgccttctggggcaatggactcggcagcctgattgttgcgctttcgcttgctggtccatctcagagcctttggtatgacgtagatactttgagctgcttgtttgagatcagacaagaacttgtcggagaaggccgcgacttggtcggaattgccgaagagaaccttgacatcctcgggatccaataccgtgagcgaggtcctcttgtagatgtcctcaatgattatcatatcatgaccaaaggtgtgctccgtatcaacaagttctttgattatgtgacgtcgcttcttgagacgtcgctgttccggagaaggcgaatccttcggctcaacccgaatggtttgctcggtggatggaacaagtgaagtagcggaggagtcagcggcctcgggagactgaatagactccaaagttcggaaagaagagtcatggctgctgcccgggctatgtcccgcggctctaggagcagcctgggtactgcgactgagtccaatgtggctcgatgaattaagcgaattttgacctccaagaggttcattatcagtagagtgcatcgttgagggcgagaggaatcccgaagtaaatgcatgaggcagagtctggtcgttggaagcttgagcatcaaccgagactcccaggccattgtttttgttggatgcgccagcatcttggtttgccgaaggcactaggcggggggtgagtaccccttcagtgcgcatgccatcggtttcggtgtcgggggttacagcatcatcttcggctgcgatctgcatccagtccatgatggacggagacgcatgttcccaatcatcacgtccaaccaaactagctgtgtgtgagagtgtctctgagtcatggaaatctttgaaccccggcacgactaccggatcctcagttaggctatcgggtcgcccatctgcacgtgtatctgcaggatgagatcgaggctcggacgaggggtaaactgctgggccaaggtggtgactcctgcctcgcgtcaactcctccagatagagctgagtggcacgcttcgaatcccatctgcccaatctagctaagcttggtggatcagaaaaggcattggatcgaaactgttcagatccttgaagtgtgctcggacccattacgccgtgatcctgaattgaagctggtgattcatcgtctaccattgaagctggccttgttgaaacagccgaacaagtttcagttggtggttccgtttcacggcctcgtagcagagaatcatcaccactctcgtcacaatgctcgtcacaggtggaatcttggtgttgcccagatgaccaggaactcatactccatcggttgtgaagatcagtttcattttgagcctggtgcattgacgcacgctcaggctcttgagtatcattactactagaggaattgtagtaaggcgtatctccaagcataatctggatggactctctgtcgtcattctctgaaagactgcaatcaggttcgtcgcatgagtcgtcgctccggttggacccgcggatttgcattatatgatccagaagagtttgagaaacgctgggattgcgctgcagcagcccggactggggctccggatcaaaagtagtgacatgggtatcaccagagtctgatgtggcacccgaatctgtcgggtcatcaacggtaggctgtccttcacctgaagttgttgaatctacaccctgtgggaggccaagagtgggagagtccatcgttgtgtggggcgctgccgtatccgatgccggcagggcagtgttgaggtgcagcctaggaacggcttgaaccccattttcgtcatactcaaccgagccggtcgagtctttaaccatcgtagccatctcgtcggatgacggggcgtggatcacaggcgggttaggggtaattgtaggttcatccatcgattgcttgagatcttcattcgtctcctgttctcgcaccgaagcgtgacgtcgaagctttccagcagttgatttgttcggtcctctgtcattctgattctcttgaacatccgagtgtcggtagagtgcctgttgaatgtgccggcgacgagcatcaaaatcaaccttgaccaattcaggtaatttgcgttcaggacgagaccgcgagttgttgtaagtagcgtgtttttgtaaattcaaaactctatccccgattttggagcgtggggagaccgcagcaccatgtgagacgggttgtcgaggtcgtgaactgcgcaacggaggcgactttttaggtggcggctcagcgatgtaagcttcaagtcgccgactggattcagataactgattgcgtgttcggccgattgttagatcccgcctaccacgcgggttcgtcgcgaacgaagcgggatcatctgctggtatgcggggagaactttgtttaggtgacggaataggaaggcggctgccgcccctgggcggcgaggtaatggcagcggatcggctgctgaatgttggattggaggatggggataagctttcggaaccggaagtgacgaaacggtgcgagcagacaggaatgcgcgacttggaatttggactgcccgggggcgacccatggccgggtttagtctgccgcaagggcgcaggtaccgccatttcaggattccacggatctgcaaggggctctcttgttctatccaaatcacttaggactcggcgatgtttgccggtgctatttatcccggcctggactgcctccaaagaagttgtgtgtccaagataccatgcagtgggcgtgagtggtgattttgcaggatattgatcgagacgctcacggaaggctgggttcgggcttggaatacttccatccgacccacggcgttgttgtaaacgcgatatggcaccgttgttaacctgtgtgttgataggcgacagttcaccaaacaatggccggcgagtatgcgattctgtaatccgttgaaacagagggggtggaatagcactatttgtatctagggccggaccgattctgtctatctctggcgacgacgggttcgaatccgctggcgctcgagaattgctggtgatcgactccggtagcgaatcacgatactgacgacgccgtggcaacacccgatttcgctctccgtcaacacttccggaaggactcggtgctcttgaggttggacgcgaaacagatggcaaagggaggacctgatccgtggttttgttgaacttgttgacaagatctttgaacgacggctgtcgtgaccttgggttcacatgcaacgggggtatgttgaccgagggagctcctagcgttggcgaatccgaggttgaacggtatggttgacgtctagtgcgcgatgactccaacatggttgttggcaggggtgatactttgtcatcgactgaaggatagtcggccgcggccatgcccattcttacatcaccaaacccctctcttacattggatgaagtgcctggcagggatccacgctggcgataataatcagcggggtctggagactcccgtcctctacaatcttgcaattgatcgcccgacgagaggtgattcgcggaagtagaggaattatggggtcgtatgaagcccgacgatagtggagcatacgtggtcgatggttgtgcctggggagagaaggagacggtcggcgagtcacctaaagaagtggtagtgtgaccattggcagattggccaaatgccggagccgacaattgtcgcccaaacggaggtgggtggcgataccggacatcaaaaccctgctcgtcaccgccagacatcttgcatgcttcaggccgacaggtcgacgtggactggtcgcggcctttcggttctgggcgggttgcgttggtgcgttgttccgggatggtcgcccaacgggaatgtcgcaggtgagtcgattcaggctacaaagcaatcctcctgggtggcgcacacccattcagcattcatatttgagacaactcgccaaacaaaaaaaattcgatatcgaggggatatttccccggtcaaagctcgaaaggtaagattgttggatggagttcgaatcggggggatcggggaagagtagagtggtgagatcgaggatcggccagttgccgaaattaaactgtcgtgagagagagaacggataggaggatcgagctccagacggatgttttgtttaccagccgtggctgctgataggtgttggaacctggtagttgaggggtttcaaagcgaatcctgactgtgggccagattgctagctctccgggccaatccgtgttgacaggctgacctgcactagtgacaaagaggtgttgaagttacagtgtcgatctttgaacaatattttgtgatgggtggaaagaaagaattgtgacgagttcgaggaagaagactcgaggaagagggaagaaatcaatcgggactagtggatgatatgtttaaagtgaaactgaatttgggagtggatttggcggatgtggtggatttctttgtctttgttcattgttcagctggatgttgtactgtacgtggaggaatcctatatatcatttcctcggcttgtaccttttctatacatcgcaaatacctcgactacacatccatcacaccagcaataccgcaactgacaggcgtatacctccgtattgtacctcgacatcccccaggaacaagattaatctcccggagacccccatggatgacgcagtggagacgcaatggccagccctggagtatctagaccgccccgttccatggttcgctccgatgtttaattggtagctttgattggttcctgatttcctgatttcacttacttttccacggaagtctcttattgtatgttgacatctatatacttcggagacttcagagacttcaacggctcatccatggttcaagattactgatactaggaaggtgtcgagttcgagagcattcgcgtatccgaactttgtttgccgcgcacacttgacgcgtcgcgcgaacccatcaaaacttatgttgtatacgcaatgaaccaaactcacagggatccgaaaaaggaattacacatttaacctgagaatcgcctctcatgggcaaaaagaggaaaagacccatcaaggaccgcgggtccacgtcctcgtctcacacgggtatcaccacgtctccccgccgtttcaggcctccccatgcgccaattcccctgggaacaaaaacaagccatcccgttatctcgctgtactaccgaaatgtcgtacccttgcgggagtacctgctccataaacttcccgtgacctccaagtcgcgtcggcgccgcatcctgacattgggctcgcgggaagaccaagggaccaatgcacaacttcaaacgtctgagacattggcggagctgctagactccacactggtgggtgtgctgaaggaatcgtctccgacccttaattacgaacgacaaaagcaatactcctcttttaatgagtctcaatcgcggtcaattctcgtcagcaccgataccgggccgacttgtccccaatcggaggtgagcccatgacggccgaatcatttacaggtgtcagattgctgatccttgtcgcaggtggttgactttgtgatctggaaaatcttcaatcgtagcaatggctactctaaagaggccaagcatctgctgacgcatggcttcaaacgcatgtctatgcaccatgctcaacacactggtattccaggcatcgtgtctcagtttccgaatcagaatgttcaggttctcaagaagggtgcatgggcagaggtcctgggcttgcttggtagtaatggggaggagattatgatgcagctcctttttgattgcggagtttttgccccgatcgacgctgaaaatggcatctactaccaacttagcggtatgattcggtcaagatgtagggagagagttgatcccggtttgctgatatttttataggtatcccactctcggatctcgagcctttgagcgacgcatctgcggaagccaacggctctactgccacagcacaagactcaatgcctaccgctggtcaaagacatcccaaagagaaagctgaatacaaacagagttccgagatgctccaaagcccaaacaacattgtgtttatgcggcgacgtatcctctatgggcgtgtcgagtctaaaaagggagtagcctctggactaggacagaaacgtacgtgcttcgccgtttgaataatggattttaggtttatgctaattcccattagatgttcttggccgcttctcaacgcttgattcgatggcgcaaacagtccatgttatgaagtacatatttccccgtcaattcggcctgctgaatgtatttacgctggactcggatcaacgcaagcagatgaatgactcgaatggtttcatgtctcgtgagagtgagatatctcttttggaagaacagaaacgaccacaggggcctcagactgggagtgaatcagcagatgcaggttgtggtggcgtgaaaagtgtcaaggtacctaagaggcttcgtggaattactatagagcttgtccggaagctccggaaccgcaacgcacaatgctcctacggagagttgctgcgatactattgtccaaccgaagtgagacacttttgttcacattggctaggattgtgtagctgacctttggcagcaaaccgaacccagactccttggcgcatctgtctccacaactgatgctaaaaaaagcgagcctatctcctctctcgagtcaaattttgtaacacaggtgaactacccgtcgccaagtgatagttcgcagacctcatgtgatggcgcgagatcagagccgcacatagctgtcgacacatcttgtggaaacgatgccgagaaaccggtgatccgaaagactcaagtcagtctaactgatcatgcgactccgccatcttctgtctcggcattttgtcgagcggtaatccagaaattgatcccacggcagttttggggggttggtccagatggtatttcgaacttcaagctggttctcaggcatgttgaccgatttatcaaattgcgccgattcgaaagtctaagtctgcacgaagtctgcaaaggtgtcaaggttggtcattgcttgcactgaactgatcgtctgagacaaagccgtactgatccgcacgctagataacaagcattccttggctggcgccaccccaggtccagactagtctgccatctgagacaagatcgaagatcgccctgtctgacttgcacaaacgcaccgagctactccatgaattcatgttttggattttcgattcactccttattcctctcattcgttcgcatttctatgtcaccgagtctcaagtgcaccgaaaccgccttttctatttccgccatgatgtgtggcagcagttgacccagcaacctttcggtgacttgaaggcaatgatgttcgaggagcttgagtcagatcaagcccaacgtgtgctggcgcggcggtcctttggtttcggtgctctccgtttgcttcccaagtctacaggcatccggcccatcttgaaccttcgcaaacgagatttgaagacacggtcatgggggaaacgggaaacgtaccttggcatcagcatcaattcaagtattacgcctatttataacatgttgacctatgagcgtgagcaagctcctgccaaattgggctcgtcgatactctccgttgcagatatgcaccgccgattgaaggcgtacaaagaacaattgtcccaacgactgccctcggcttctagaccttggcaatccaagctcccaccgatgtactttgtcaaggttgatatcaaagcttgttttgatactatcccccagaaaaagctgcttaatcttatcgaagagctggtctctgaagagagctactgcatcgcaaagcacaccgagatccacccgcccacttctactgcgaaacaaggaaagcccatacgaaggtttctgagtcgcgctactcctgctatgaaaccgcaacacctaccagactacgtcaatagcgaaagcacgacccgaaaggccaacaccgtttttgttgagtgtggtcaaaaagaaaatgatgctgatagtcttctggaacttctcagtgaacatgtccagaacaacctcgtgaagataggcaagagatttttccgccaacgcaacggcattcctcaaggctccgtgctatcaagcctcctttgcaatttcttctatgccgagcttgagcgaaaggtactgaatttcatcaaacccgaggattctcttctcctgcgactcgtggacgatttccttctggtcaccccggatgtagctgtggcaatgcagtttctggaagtaatgatcaggggccaaccatcgtacggtgtacaggtcaatccagcgaaaagcatggccaatttcagcgcagcggttgacgggattttacttcccagattagagggaagcacattatttccgtattgcggtagtctcatcgacactcacacgctggaatttcaccgcgatcaagaccgcatccttcagggcggcgagtcggctgctgctactctctccgatgccttgaccgttgaagccgcccgcctacccggccgtacctttcaccgcaaaatgctctcctcattccgtctgcagctatattccatgtacattgatgacggacacaattcgcgcgcagttgtgctagccaacctctactgcagcttcatcactgctgccatgaggatgtaccgctatatgaagtcgcttcggggtcgtgcgcatcccggccctgccatcataacacagactatccgcgatctgattcggcagacgaaccgttatatccaggcccggcgtgctggtaattcggagtccccattctcgtgtttcgttcagcgatcccatttacagtatctggcttctgcggcatttcggtttgttttgaagcgcaagcaaacacggtatgcggtggtgctgcgctggctagactcgctgagtaaagattctcgacccacatcagattccgaggcttcgagaatagcacaggtagtgaagaagggaaatgccatgttcgaggaatggcggttctagaatagttagtgccggaatgtctgcaaatcaagtaataatcggtgtaattgtacgatcaattgccctcgactagtataattgcacaattgtacgctcatctccctggggccaattaaatagtgcatacagtgccacaatctattcagcccgccagcatcattgggcacaaatccggctaaatccgattgaaacagatcagggttcaggggttcaaatcaagatatctttgatctgtgttcagggactttcaaggctatgtaggttatcccttcccatctgggtagagatcagtttccatctaccgtctaccacatacaacatagaatgtgttgaatactttatcgctacttcttaatagcccctttttaccctagtgaaacaaggtagcgccgaggtacccccctgttctcagccagaccgagtgcggcataacggcctgaggctctccgcttgcaatcttgagcatcacggtttcttcttctcactctcttttggattctcactgtcttcgtctctcgtttgaatcttttacttcttttctgcttacttccacccccacactcttttcctactgttttttgcttaccctctacaacccccctggccctcaatggtcaccccgtaatcttctctcctgatccctctttacacgactacacctgatctggatctcatcaggctgcggctgtgcctgcaattcatttctacattaattgacttctattgcggtattattctttcctgtctggaaacgcctgaccattctcattcaaaaacaccgatcttcacgtccgttgttgaccccttccggacatccgccaatttcctcccaccctgtgtactttttcaggtcgatcataattgcggggatcaatacatctgaataattacatgagatcatgaccaccgttttcccgacacccaattcgccccccgagctctccgggtccaaatcctccaaatcctcctcgtttcattcctcctcccacctggacggtgcggagagtatctttacggacatctcgaattttgaagacattggcttggaagatgataccgatttgacatacgccgatcctcgaggctcctacgcccgctctggggtgatggcacggtcgcccgccgccagaatatcaagcaaagtccctgcggcctcaactcgcgacttgaccgcggtccccaagcctcgcaagcgaagccccctgcccccgctccacagcggatcgaccaatgtgtcggcaggctccctcactgcgagaactgcagcccgaaaggatccaggcaacacattgcattcacccggtttgacaccatcgcaagctcgccggtcacggtctgtctcaccactacggccgacatccagtcgctccgcctcgagcaccagcctgggtctctctccgctatctgcacgagtgcccatccagaaacaaacttggcaaccgaatcgcaagtcggtcaaagatttggaggaagaataccatgactcggacgatgaactaccggacgatgcaagtctgtggaacatccctatttctccgcgcccagttcaggatcgggctccatcacggtctgccagtccaaatgggcgcagccccgggcggcgaccactgcctatccagcacgtcatacccgggagcgataagcaagcgtccgaaaatacggccagggcatcccgcatgaagcgtataccccgatcgagctccgcaggaccggagcgtggacaactgtcgccacgcaaccctcgtacctactcatataacagtttcctatctgacttgtcggaggaagctaagatcatcactgaagctctggagctgcatgctgatgatagagatcgcaagcgggaggagcatattcaaaccggtgctctgcggaagtccagcgaggactcgcatcgcgcatctcgtgatgctgtcgctttaccgcctctgcagaaatcaaatatcatgatcgatccgctgccaattagcaaggagaaagaaagggtcctcacgcggacacgccccagctggcttccgcctaaggaccagaaggaggagagaaaacatctaaagcagtatcagcaaatgatggcccagtctcgagaaattggtatgtgcaagacaagatccgtaaagtattgtcgggcttctaattggtatttcagagaaacgcaaagctgccagggaggcaaatgcacagtgtgaaaaggataacactcgagctacactgcagaacatctgggatgaatatgtgtatccgaattgggaccgcgctctccgcgagccccgaattcgcgagttatggtggcgcggaattccgcctcgcaaccggggcaccatatggaaacgagccattggcaacgaactagcattaaccgaggaaaccttcactaaagcgttgctccgagcaaaggatctccaaggcaagaaagatgtagaaagcgagaacagcaaacgactactggactgctttgaggcaatcgaaacggacgtgcccaaggccttcccagatatgaacctcttccaaggatgcggtccactacggcaaaccctcattgacgtcctgcaagcatactgcatgtaccgcagcgacgtaggatatatccacggtctgcacaccatcgccgccctcctcgtcttgcaattccccacccccgcttccgccttccttgccatggccaacgccctcaaccgtcctttgcccgtcgcgttcctcacttgggaccgcggcgccatggcccggtcctacactctagcctcagacaccttgcgctacaagttcacccgtctacacactcacctgaccgacaccctcaacctttccgaggcagagatttgggagcccatattccgctcgctgctgacaaacggccttgacctcgagcgcatctcccgcgtctgggactgctgggtcttcgagggtgatcgcattatgatccgctccgccgtcgccattctgggctgtctccaatcgcaactgttctccttccaccagagtgatgagcagtcccgtctagctgtgcgcgacgtgttgggctggggtccccgcagtcatggagccaacacccagaaacccaaagagcggcatagcgcccctgccgcagctggctttggcggtgggcagatcgagaaccccggcattgccgattattgggttcttggtgcttcgggcgacgaggatgacttcatgaatgccgtccgcgaggctggaaaggtgcgccagccaattcaataggcttggatataatacgtgccttcgcaatatgtgtgctctggtctgtcaggttctcacctttacttcagcctttcgttcttcttcgttttcctttttcctccttaccgtaccctcatcattccagatagcgcatagaatggcatcacagcctggccaacgtgtctgcttgccttcctatctactatctacccgtatacacatgtcactcgttgcacagccgttttgtctattctatgtatcttgaactgactgcatgagaaccactcgtttctttcttctcgttatattttttgtttttctttccacccaggaaccccaatattcttagctcattgattggtctttttcacttcttcctggttttcccactacttctccatcttgtatttttagccaccccgactttcatgccttgatgcatcgctgtttttcatcgttgatacgtacttgttagtggtattacaagcaattcaggtcttttgcagtcattccactatgttcactgagaaatatactgcattgcatagctggggagcatggttggtattggaggaactgactgataaatgtttcttaaggaacccccatcatgcagagccagcagcaagaacatatcccccatcaataacaacagtctgcccattaaaatactgattacaaaccgcaaaaagcacagcaccagccatatcctcatctctcccaggcctagcaacaggaactttcacccgatacttctcatccggaataaaactcttctgcttctcatcactctccccagtagtcatctcactaggaaaaggccccggcgcaatattattaaccctaacccgcagcttcgacgaactaacctgctgcgcaagcaacttggtcaaatgaatcgccgccgccttggaagcattatacgcaaaatggtgctgcgccatcttcacaatcccagacatggaagtcgtgttgagcacagtgctagaccaaccatctccaacctccgatccgcgctgcagcagcggcaggaacgccgttgtcatgaagaagatatgtgagacattctcgcggaagacctcgtcccactcgtcgaacgtcgcagccgggtcatcgaacagagtttcgcggagctcggatgcatctttgcgctcagtgtcttgcgtctggctggatattccggcgttgttcattaggattgagaggtagccttcgcgcgtggagatctccgagactagtcttctgatctcgtctttttcggttacgtcggcggcgagcgggattattttgccgcttatgttgttgccgtagagagaggctacgcgctcgagtttgtttgcggtgcgtccggttatgtatactttggcgccgttcacggctaaggcttgcgctgccattaggcctattcctgagccgccgcctgtgattagggccactgaggttgttagaacagggttgttgcactggggtttatatattgctcacctttgtctttcacgttgaacagcttttctagcttgaggctttggttgctttcactggctgctattttggtcttgtctgaaacgggggcttttctagtggaatttattccaaattgacgagatggtaggagagaacatagcttgggtcggattaatagaattgaccttcgaattgtttgttttttgctgaggactgttgtgtataatcgcggcatggctgtatatatagacgaggtaaaatgggggcaagtctttaggacaaagctcgaacctcttctagtcatacttcgcatgttgcggccatgaatcaattgtaggtcggcagttgcttcaatcaactatcttgtcagcatccaatccctacatacgaagtgtatcagaatgacgtcacttaaattatgtgaacagagcagaaagactcaaacggacagcaagcacagaaaaagcagagtaataaagaaaatgaaaccaactgccatgtaagaggtatcttactaattattgtagaagtgactttggttacatttttgagaatcctcatgctggaaatatatttactacctgagataacaggcaatatttagcatggcctgcgtggccttcatcagaatcctatcatctgtcatacattcacagcttggcctttacagccaacgcctcgctgaccggcgccacctcaaccatcatcttaccggtgttggcaccagcatagaggtcaatgagaccttgaggcgcagcctccaagccaccaggcacaatgtactctttgcgcttgagcttaccctcggacaaccaagtcccgagatccttgagtgcagccgggaattgcttcgcatgatcgaagacaatgaaacccttcagggtgatccgttgcgactgtcatcaattagccgaagtccccataaaagacacacccaaaaccaagagaactcacaatcacactcataaaactggccggaccctgcggcttagcagcattatactgactgatagcgccacagatagcaaagcgcgagccagtagccgctctcgccaagcaagcatcgaggatatcaccgccggtattatcaaagaagacatcaatatactcaggcgtagcgatcttaagctgctgcctccaatccgcatccttataattgaccgcagcatcgaaaccaagctccttgaccaagaaatcacacttctccttagtccccgccaaccccacaacacgcttggcgcccttgatgcgcgcaatctggccagccaccatgcccgtcgcgcccgcagcaccggacacaacaaccgtgtcccccttcttcacctgcgcgatctcgatcatgccaaagtatgccgtcagcccggtcatgccaagcacggacatcgcgtctgtgggccgtccgcctgccggaacgtgtatcttttccgcctctttcgcgccgaccacggcatactcctgccagccggagccggcgacgacccagtcgcccttgctatacttggacgtcagaccgctgccgacgatgaggacctgagcgatgctctggccgcgcatcacggcgccttgctcgacgggggcaatgtaggagcgcttggcggtgagccattggcgcatggccgggtcgagagagaggtagtgcacgcggacgagcagcttgtctgtaggtacatccttggggatggggatggtgtttagacggaaggtgccattgctgagagaggggtcgatggccggcgcgggaggcttgctgtagatgatttgtttgttggacattttgaaggatgcttgaggggattctgagtgaagagagaacgttcgttgtcgaaaaggaagaggagaaggtggaaatatctacaacatatgtaggatcggagacactccagattaggaaaactgctccttgggcctcggcttgtccccgggccaaagtcgaagtgttgaataatcagcttcttgcagatgcattatttttttactaggacacaataggatgtctatgtcatccatcccagaagggccctcaatgaccgcaacaagatatttatatatctcgaacgggtgatctagggtctgcactcatcctgacgtcattgacaaagaagtataaaagcaggaactgcaagactacgaggactgccacattcttctaataacaccgagacaagaaaaataaatacaatctccatattcaatcatgtcgcaaccaccctaccaaggctatgaacacgccgacccaatccatactgcccgcggcgaagtgggtggcggctcctcaactggcgcccaaggcatcccaacaggcctccacgacacacgatccgattacgatgaatccaagggctacaactctgccacaggagccagttactcgcgagcatcggcaggaggaccgacccagacccaccagcgaccgctctcaccgtcgcctcgcagcgatgaccggattgtaggggatgcgccgctcccgtacacggccagtacagcgcagcgcgcggaaatgggtgatcgttcggctcatgggactcatgggtctcatggacggtctggtgagaagttcggggaaagagtgaaggaagctttcgcgtcggttcatgtaagttggaatctttctgctcttgggaaatgagaaactgaatttgctatagggcgctggagaatcattgcgtggaaacttgaccaccgctgttgatcgggcttttgggtctgaggatggtgctgagcggaatcaagagattgcgaatagaggcgaggaggagtttcggactggtcagtttgtggggcacagggaccatagaacataatgtgtgatattgggaatgtaattaggaatctgggatattaaataagaacatagctattgaatatgtatgttatgccgtcgaaggttagggcccggatccaacgccgatcatacatcatggtagaaggagatcgatacgatatactccataaacctgtatccatcagccaagcatctcccctttgctaagacattcttaaaagttcttaaacgttcttagaattttttaacttttatacaacgtaagttccagagaccatccgaccgacccgagaaggctgtgctggtggaacccacctgtttccggttatgaacgcactcgacacaacattcttccttcaagtatattctacaaaggcattcctataatcctttactccgcattttgatcctggcccacatttgtgcatatagccaatgccaggtttggagacagttgcacactcgtacgacctcatgctttgaaactggttgataagctttctttctcggcatatatcgtcatggtctcaatttccgccgaccaaccggcgtcggaaagcgctgcgacggccgccccaacaaactcgcaccaacaggcattgtactcctcggagacggcatcctcgaatctgctcgggtcagactctccctcccaatattcgtccttctccagctccgatagcgacgaaccactgagcgacgaacccatcccgcactcgaccgaggtcaccgatgaagatgccgccggcgacgtggtgggggttagcatcggacgcgagcagagccgcatgaaggcccgagcaacccccgtggaagagaagaatcgcgtgctggaacaccagggatcatatttttcgactataccggatactataggcgaggatggtctgtttgcgtcggaactcacggccgagcctgaaacggtggagcccaaggttgaaaaagcaccagcaccaaaaccaaaacgagcaccaacatcggcaccaagaccagcaacgggcggggagaggcgcgaacataaacctaggccgtcatactcctccgcacagtatgatgagcctgaaccaggcaagcttgcgcatggccctcgcagcgatctatttgcctcggctcatgagaaaaccgggtcgaaagatgcagccgggagccagcggtctggttttgtcggggccttgttgaagaattcattacctcgccggccacgtgcctggtccaacgagttgaagaaattcctacctgacctgacctctttgaggaaacggccttctctcgcgttccgtgcccacaatggccaaaatcgaattcgcagccagacggtagcccctgcagctaaaaaacccttgagccagccgaaaagaacatcatcgctggtcctgcacccgcaacggtcacctcttgcaccgagcggttcaagcatcgaggatgaaggagaagccgctcagtcgatacctgagctgcgctcgccagatgggacctcggccgcgaaacattcctttacacggcggcctagttcagtcatgcccggtcgaccgccaagtttgcggaggtcctcgtcggatcaatcgctgtatctgcgtgcgtcttccacggcatcgtcccttgaacagcgaccattatacgagaatgtacattctcaggtaaatagccggttcaaggcaatcaaagatagtttccaagactcgagtaataggctgctcagcatgccgaatctccatctgcaggatatccgcaatgagtggggtcaattcctgccagagcttggaaacggtaacaacaacggtgctagtagtacttccaaagaggaacaatcaccgcgggctgaaagcccaccgccaactccgcggcataatcctaactcatcacatccagtcttggaagaagcaatggaagagctcacgggcgatgttgtgatcctaggaggttaccggggatcaattttgcggtctgctaagccaccccatcgtcaactttgggtgccgatgaaggttggtctgaatctgcgcaaagtggacttggaggtcggcctgaaaccggaggacgaggaacacatggaggagaccatcattccatccggggttctgtcccacgtgggcccggtggacgtctgtcgacgattgatgaagcggttacgcaggagcgagaatgcccagcgtggtgaaatgcgcgtccacgattatggatatgactggcgtctaagccccgagctgctctcgcgcaggctcatcgccttcctagagagcctgccatgcaatcaggagccttcgccgggggagccccgacgcggcgctatcgtcatcgcgcacagcctaggcggtctcatcacccgacacgcggtcaacgagcgaccagatctcttcgccggagtcgtatacgcaggcgtaccacagcactgcgtgaacatcctcggaccactccgcaatggcgacgacgtcctcatcagctcccgcgtgctaacagcccaagtaaacttcaccttccgcacaagtttcgccctcctccccgaagacgggcactgtttcatcgacaaacaaagcaaaaaggaattccgcatcgacttcttcaacgctcaaacctgggaagattaccgtctctctccttgcatggctccagctctccccgtacccccaacacccaccaccctcggcttcaaagacatccccataatcggcaagcgcttctccatgggtcctcgcgatgactccgacgaatccatcacccaagacccacaccatgtcacacaagacggacaccactctactgccgcagtagataaagacgtctccgcccgtaacaacaactcaccacacagcgcggccgcatacgccgcatacgcatctgaaaaagcccacgacccagccgacggcttagtcggaccaggcgcacacccgcgcagcagcaccaccacaacctccaaaatcgccacgacgtgcaccatcccgcacgccgccgcgagggagtacctagagcgcacgctggcagagacaaagcggttcaaggagaacctggcgttccggccgacactccactcggagaacaggtacccgcctgccgctgtgctgtacggcaagacgctgccgactgtgtacggagcgcgagtcgtgtcgcgtgagactatcaagcaggtcgatgcgtacgatgatcttgcgtttgcggctggtgatggtgtttgtcttgcttcggctgctatgttgccgcctggatataggattattaaagatggtctggtgaagagtgaacggggccatgttggattacttggtgatcttgagggcgttgggcagtgtctcaaggctattcatcggggtaggaaggagggagttggattgggggagaagaacatataagggttcgatgtgcgttcgtgttattttctggtgttggtctttttcttgatgatctttgatgataccattgccatatgtttgatgatttgggttatgttttttttttctgtttgtggatatggtatatttagatgtgactgtgtcatattgcattgagtctggcatattggcgtttctatagcaggggaggatgagactatttacatagaaatagaaagatagagaagaaagttggagcagagctcaatatacggatatggatagatcttgcacacacgctatgtaaccctatgccattctatgcatgtactttttgtcctcgtccaataccaattggaatagagaccgtctatcaagacaacagaagaaaaggaaacagtatcccggaattccatcacagtatatgaaagcatcacagtatatgaaagtaaaaaaaagatcatgaagaaggatgctataaaaacccaacaaaaagaaaacaaagtatcatcaagtctttaatccgtgcgcgagttggcaatgttcatgaccaagatatcactcgcgccgaccttaatcagctcatccattaccgtggcaatgtgcttcttctccaccatggagctgacagcaacccagccctcctcctcgagcgcggtgatagtaggcgcacgcttgccgggggtgatcttggacgcgattgccagctgctcacgcgggatgttgtattggcacaggacgaacttctgggcggtgatgacaccacgcagacgggagctgagtatagtgagcatttcggagttggtcttgcgggacttgaccagcacagcggtgctggagacaacagtgtcaattgccttcaggccagcggccttcatagtctcaccagactctgaacagatttgagtgttagcaacgggttccggttccctgttccgtattccacaggacagtatttcagtagactggcatatcacaacataccaacaagatcaacaataccatccgcaacgccgagagcgcaggcagcctcaacactaccgccaacatacttgatattcgtggagagtttctggccaacttcggcgccctcgaggttacggaagaaagattcagtgagggcagtgaagctggtcacgacgttgcggccaacgagatccttggcctctttgatatcgcccttctcaggcacctgcacttgcagcttgcaggcgccgaagcccaggtcgaggatctcctcgacgttggaggcctcgccggtgggcagggtggcatcgtgctcggcgacctggtcgcggccggtgattcccaaatcaacgcggccttcgccgacgaatgtcgggatatcggcagcgggcaggaagatcagcgcgatgggcaaattcttgaccagtgcgatatcgaggcgggtttcgcggcggaactggacgtcacagccggcgaggaggtcgagggttgcttgttgcagacgtccttctgtatagtggagtttgcgccgtcagtcttggtttctttgtgtttgtttcttgttcatgtgggtatcgctgctcgcatctatgagtcacgatttgggagagcacttgcttttgggcacggcgaagaggagacggccttcgaggctgtttagaatcgttatattagcagaaatccccatgcggtttgtaattgaaattgactcactggttgacgagatccatggtgatagagcggtgcggcgcggggctttctacagattttcggtggggggaataaggtgatcggggatcgattgacgaagtagtcaagtcaattgcaattcagagaccgtgaatataactcaaagacaagatagaacgattgatatagtccggaggagtcggggagagagaccggagcttcttgcggcagaaattggaggggcagattacaccggtgggttagttacgggaccgggggagtatgtaccgtgttcgctgcgcagtacgagcccacgtgatgggattctgtggtgtatggctatttgaagtgtctataggatatacatggtagagtctagaatgagtttctaatcgattgaataggataattggctgtacaggccgaagttgtctaaaagtggtgctgaacgatatcggagtccgaagaaaatatgttctgcctgaatatgcctgacccatcaggtgtcaattccatccgctgactcatccactgcctgacggctcaggtgtccagccctgagccctcgcgtaatttgcacgaacccacacaggccaaattccactttacactctcttacctacagtccaaccaattccaaccctcgagctcaacgccctctccttccctccaagatggattccagcaagcagcccgttaagctcgtcaaggtgacccgtgtcctcggccgcaccggtatgtgctttcccagcatttttgaagctccaaacccataattcgatattcgatattcgcggggtgcaaccattgcgccccggatcgcccgaaacaaaccgatgaaaaccagacacttggaggaatagcaatcgctaattttggtctatttaggatcccgtggtggtgtcacccaggtccgcgtcgagttcatggacgacacctcgcgttccatcatccgtaacgtcaagggcccaggtacgcgatattgatttctttgcatctgtcttttgggatcacaagaggagggagaaagaaacatggggtctatcgattcattctgtggaaagagccccatgttgaaatatggaattttgaagatcgacccaaaagacaagaaaaactttgccgaaccgcatcgctaacatattcctccgcaccagtccgcgttgacgacatcctctgcttgctcgagtccgagcgcgaggcccgccgtctccgttaaaattcaccaaaacgaaatttcgcttgcttcgtctattttgtctctcttcttctctcgcatatcccttacgaccggtttttcatgattactcttcggccaaaatcgagtcccccgcttttctttcttgccgtaccttcaacctcctatcctcagccctaaaccgccgcgctgcccaatcatccccacctgccgactctcaaggggccgtttctacgatttccgacgtttcgactggaggtgacagtttgggtggattgacttttggtttttttattttaaacgaaagtcccggaaggtcgattatggagaaacgatcgtgagagagaggagcagagagcgcaaaaaagataatagaaagcctttttttttattgatacgagaaaacgaaatcaggttcttgcgcgagggctggtttgtggacttgtggcacggtctggtctggtttcgatcttggtgttttactacatacacacgtccatttaggcgtgattgcatgggctcaatgcgacaaacgaggttgttatgttgtttcctctcttctcttcctcgtaccagcttcccccattactggtacttagaaaagaaaacgccgactcgaaccaggccccgatcgacaaaaagaacaatggaatccaaaaaaagtttgaaaatttccggttcagccttgtcgaggtcgaggtctgaaagcgttcgtagaatctgccagtgtagtcttgtgagtttctagtctaccaagtacattggtgtagacggtagctgtgctatgtcaaaccttcgtcccttctaaattggaaggtctgtatctgatgcgttttgtcgcctttttgtctttctagatataaaaccgagaagtgggaaggacataaagacacaaggccgcataagccaataatgtgatatttggcttttgctataaagcttcaacaaatgccatacttattctactatattctactaatgtatattactccatcacagacaatcgcaagattcgttctccgacatacatggtcctagtgagctacagctgctccgcactggccatgagcctactaagaaggccgtcatcagcagactctccgtcgagaccactctcatcaaggacccgaccaaccgcccccagaagcccagccaaccgcttccgccggatagattcctctagctcagcactcttctgacgggcgacgtcaataacatcggagggcaagttcgccagacgcgcaacattcaacccgtaactgcggtgcgcaactccctcagtaacctcgtagaggaacgtaatctccccatcgccgtccttgtccttgctacccgtctccgtgaaccgcatatggacattacggagagcatgatccgggaaggaatgcaccatgcgcgagagatgctggtaatgcgtgatgaaaagggtgagtgattggatcgagcgcaccatatagtcaagcaccgcctgcgcgatagcgacaccgtcgtgcgtcgatgtgccgcggcccagctcgtcgaggataaccaaggatcgaggcgttgcttgcttgaggatatctgctgtttcggagagttcgaccatgaaggttgattcgccagccagcatgttgtcgaaggcgcccatgcgcgtaaagaccgcatccaggagaccgagtcgggcggaagcggctgggacgtaggatccgatctggcccatgattgcgaccagtgctacctgtcgcacgtagctggatttaccgcccatgttcgggccggtgacgaggagggcgcgcgtgccgtcgtgcgatagatttgtgtcattgggtacgtatgtgtctgtgaggagttgctcgaccattgggtgtcggccctgctcgatgtggaggcctgcttcttctgtgtattctggcttgacatagcccggttgctgggctatgtctgcaagtgataataagcagtcgagtgtcgcgagggattgtatagaatcccggaaggactgatactgtgctgcgatatcagccaggagggttttgtatgcctggtcgcaggctgctgctagggcctccttgtactgatcacgctcgcggatgagctggatgacttctggcgtgtggaagcgagacactctttttgtgccgctgactttgacccacgatgcgggcacgcgcttgagtgccggggagttgttttcgatctcgatcaagtactcaatgccggatactgtggagtattcgactttgcctcttccaattgttgacgctgcctctttgcgatgttctaacaatccgtgttcagtgcttccaatttggagcttaagttcgccgatctcctctgtctcctccgcttcgcgaaagaaggtatatttgtcattggttcgtgcagcgtgcatgttgatcttatctagatacttgacgactgacgctcggatcgtaggcagagaggcgatggcctcacccactagcgatgattggaaccccgtctgggcaggtgatttgatatctgcaaactccattgcaatcatctgcatagcttgcaatacagtgagaagttcgggtcgctcacacttggctcaacattagtatagatgtggtcatcattgcagaagtgttacctacctttccatagtaaatccggattaaactcttctcaagatcactcttgactttgcgtagcaaccctcgtactctctccaccggaaccgctcgcgcaggatcaataagctcctcgacagcattcgtccgctcctcgaggcgcactttgtctagcaaaggtcttccaacccattgccgcagcatgcgttgtccgaatcgcgtttgcgtccgatctaaggtccagaataaactaccctttgtcgagtgatccgtctggttttggtaaatttctagactgaccagcgtgtttccgttcagaagcatatgcgaacgagccgagaagggctggaaatattttgtgaggtcaaacacatgttccagcccatactcggtcatatgttcgatcatagcagacagacagatagtcacctgctccgggagactaaggacgttttgaagcaacttcgcagcttgggtatcctcctcggtactggtagccttcatctttcctgcataaaactcagatacatggctatgtgcctcggcggcggaggttttcttcttctgggcccgttcgaggcgcacggcgtccccaaagacattcatcttgcttccagataaatgctgcacgagtttttcgctagctcgggacatctctccaacaatcaagatctcacagggggcgatgtgtaatagtcgtgtctcgatctcgctccgcatgaagccatcctcaaagtcatcgtagataacgtcacccgtagccggctggacagcgacaatccccacatgaactcgttcgtcgttccccgggcccttggcattggtctccgtcatacagagcatgtacccagtggcaggagaggcacctcccgctgccggtgcagggccctgcagaccttcggcgtcatcaatataggttcctttcgtgtagaggttggttaatttgcgaacaaatggcgcattgcgattatcacccgcagccttgagcgcagcggtctcgatctgtcgcaccacgccgaccttgtggccggctgtaacgagtcgcttcacatgcacgtgtagtcggtgcaccgggatactagccgatgcaaaccggccaatgtgtgcctcggatggatctgcggtaggtcccaacattagtatgctttcggcaataatagagaagatacttacgttcgtcgaatctgaacttcccggggatgcacacgattcccagctccttggccgcaatgcgcgcatcctccccaaagaagcggaacttgtatcccacttcaatgaccagcactgtgttcatgttctgacgcttgatctcaatgacctgtttctccatgggtgtgagcttgctcccggccttcttcgcaccctttcctttgaccgagggtggtggagcaggctcgtcctcttcctcggcctctgcagcttccacctctgcgctagctgcatcattcactgctaatctcccaatgccaacctggcaatctgacccaccgagcttccgcacgaattgctggtgtagtttctccttctctttcttccgctgtttccgctctgggtcttcctcctctaccgcagctgacggagcggcaggggagctctggaatttgaagatatcggtacgctggctgctgctgcttgcctgagaggtgtgctcgaagtgcacgcttgtcgctactcgtattggcgcctccgcgactgtgcccgtggttttggctcgctttggtgctggcaccacgatatcatcatcatcatcgtcatcatcagcttccggggtattgtcttgcttcggctcgggtttgtcggctggcgatgcttgttttttcttgggtgcattggccggggttgatgcgggtttctgggtgaagaagctagagatgctcgcttgctttcgtttcaatgatggagagggtgcagaggattgcgaagaatgaggtgccatcttgacgaaggataccaatgctcccaccgcaagtatgtggagtggcagtggagttacaggttgataataggagagcgacttcaatggaattcaatactgaggtatttaatctcagcttgatctcaaattaggtatgctccaaataatgtcccatgtgagttctccgcatctcggagctcgacgcgtacagaacgcgctagccctgggcatccacccgtggagttaattggttgctgactcatcacccccaatcctgcccagcccaggtgaattgctattttgtattttactgagaacaacttgagtcaattttgtgtgacaaagaaagcctatgtctatgaatgtctacaaggagtaggtgtatatgatttgaggtttgcatgagtgatgttgagtatagacatctacaactctgatagggagagagtgtgataaattggtggactatcaagttcatgtgcacaaagaaacaaatatcacaaactgcatgagcaaacaaaaccatcaatcaggcaaaacaggtaagcgacccagggtaagagacacggggcaagagacacaaggcaagagacacaaggcaagagacacaaggcaggagacaaaaggtaagacaaagcacagtcacaaagggaccatgaaggaaggaaccttcaagaaagaaacaaaccctcagagaattcttcactgggcaacagagggctatctctgtgaaaaggttccaaaaattggcttccagagagggccagaggccgtctccaggagcacgttgttcagctccacatacgtcaatggagaacctggggaagtacggtcggtgtccacagaggttgcagggggccgggccacaacatgcttcgtgcccttagatgagcggagctcgaacctagttttcggcctaacccaggccgcagcaaagatcgacgggagacagaacgagtgaagaagaaagaaagaagagagataaagggggggagggggtatttataccttcccaatggcttaaggcaacggggtaatggggttggtgacgatttttgaccaaaagggaaggcacctgaccaggtacctgactaggcagctccaggcagcggtctctggaccctttcatcacttcagactgtatagcatcaatggtagctcctttctctatcttcccattgctctttcaggcgacctgcacactgatattcactccagtatccgtataatcatagagaagcccactcctccagccataaagcccattatcatcaccctcagtctctcaagatctctcatccctctccccatctatggtccccgaagctgacacattaccatcaagcctgatcaacttacccaggtgatccacctatctcctcgtagcctctgagaaacagtaaggtaactcaacgcagggtttaagactcaactactagctgtcactggttttgccgagtgagcgatgttcacgttcacgttcatgttcacttaacatggctacatcccctagatccagaacaagaataatacatatagtctttacagaggaatatgtctataaggaaaggatggtattggtacagctttcacgtacaatagctgttgttagtctaatcgagtcaagttgcgaccactttctcctttcgtcttctgaccagggagtgtggtgacagacagtgcaagtgacgagataccagggcgacaaaatgcgattggtcgctgtagacgtgtttggttccagtcatcacaacaagcaatggagagaagctgaaggccagctccacttgttctcagcgagccgtcattcagaggcgaggaatagccggggcagctcgtatcagatgtgggtaaagtagatttaatttgctagacctggccataatgggccacattatcataccttcccagcactcgttcgtttcccgtattaaagtacaagaagagcaacatattaaaatgcgcctagatgatagagggtactgtatgtaggaaacacgagacgtagatgtactcgaagaacatatcaaacggatatctccaaaggtagagacgtcagaagtgatgaaacactggtagtggatcggttgttttcagctgctgcttgttgcagatgatttgaatgatctgtataccattgccctcgtcaaacagatgttgctggagcggcgatggagtaatcgatttgcagcaaggttataccatagcctgcttgctatttcaaagtcttcgcccgattccagggttacacgcttcgacgacatctaggttttcaaagactcgactatattgagcttgagtacagtagttatgcatgatcattatgaataatgagaacatggagttggcgagtgttcatcatagatgtgtcggtaagtttggaaaggcctgtctgtacatggaggtacagaaaaagtcgttcgggcagctctaggactttacgaagaggacacctaagaagaattgtcgagatctatacatgctacatggtacgaaaaacgtttttgatagacatttcatattgatactggctaatcataacattgtacagcatatcaaacagcccatcaaggatgggaaatacaaatggacacccatggataatcacaattgtttggaaatagcaattaggctaggtgtcaataagtccgggtcgtcgggcaagcgcaaatcatggtcaagctaccattgtcactgtctggggtttcggtcacatcttcggtcatttcggagcatttcatatcatcactgtatcgcagggttgaccagcagattgcatctgggatagatcaacagggtcatgagatcatgacatttagttcgcatcggtagtcaaatagtatccagaaaagaggtgcccgtcttctgggatggtttcttcggatggaactgtctggtcaattgaaagccagccattctgagcagtatgctcctcttcatactggctgtcatagaaagggtgcttcgagggggcttgcagggggttggagcgatacgcagccttgtcaaagccgtcgtattcaccaagatcaggaaggcatggtgggtcgaatccaaagtcatcaaggaaattgcgtttagcaaatggggagtgccaactgtgggggccaattcggccttgggggttcggaataggctcaatgttctctttgtcaacggaggtgtgtccaattctcaaggcatgactaccggtgttcgtctttccgttcaaaacaaggcgagtgggggtcaaggtgtcaaactgcgttctgaatcccgggtccgggtaggatgatttgctatcctcttcttccttttcctgatcaacaaaaatgccgaagccacctttgggccgcttgccaaaggtgttgacagtaagaccaaactcttcatcatcgccaacataagagtgagtacggtccgctgcacggcgcgagcgacggagaaagctttgttcttctttggcctccccttccatgttcttgcggcctttgtcggctttctgtctttttctgtccacagcacggggcacgttggggtcggctttggttagacgggtactcctggtacgagcgatgcctcgtctgggaactggagtctctcccttcagtgggctgtattcctccacgttacccgtgataatacgctccttcaacagacctccgtgtggggaaaagacctgttcggttggctccacgagcgaagaagtacgttccatcatcttcaagacagcaccatccttcttctggttgcgtcggcgacgcatctgcagcgtggcggaatcaaaaagatccatacctggccacagaactcccttgagtcttgcgatttcttcggcccgagtcttgtccatctcagggttgcccgatgcctgtatttgatcaccagaatcgataaaaggatcaggggtatctttgctagcaacccatgttctctccaaggggtccggtttgtatcggcgctgtatcggtgtcacgggcaaagccaatgatcgattttcatcagctggtccagaagcatcgaccggctgcaacccgtctgactttgtgccattcgaggatcgcatcgagcggaggatgggacccgttcgagatttcacattgctgtttgccataggcaaaggggttggcgtaatgggcgggatggttgtctccgcatgttgctgtttgtcattgtgagaatcagccaagcgagggtcgaggcaatcggaaactggggtagttgtgattgtagtagtactggagccctcagactcgacattgggtgctcggttacttgtatgtttagcggcggaagccaatgcgtcgtccggctttctttttttccgaacttctttgctggccatgcgagcagacagctgcttcgcgtagccattggcgtcaaaccaatcgtcgtattgcttgagaagctcgatcgcgttaggatcgtcggtgcgaagcttgagcttgaagtggctggccagatgagccttggaggcagcatgggtcaacaagtgagagacatcgctgaaatggggctgcccaggacagatgctacacatgaggatagtctcagccatgatccaaggccccgaaggaggcaacaactaaacagatagaacgagatgcaactggaaagggcaaaaacaaccaaactgtcgaagccaaagcaggtgtgaatgaagctggcgaaggagcgatggaagaggacgagagaccgttataagcacgtgcacaaggcggacggtcgtgcctgtcttcattatcaataagctattgatattcgaggaaggtgcgtattgttgggtcgcgggtaagtcacgggacgtcattgatacctcaaaacaactttcattcatcttgtcatcattatcttaaggtacacaatgggtatgtgccacgatgtcttaacagctcttgggccattgtaggggggtatgaagcggaataagtcaacgtggtcattattctccccccgcattgtatcccaaagtccatagggcaaagaacgatgggttattagattgcgggaggtttcaatatggatcgatcattgatccatctatcaatcaactgatgaactacccggcaaggcatttggtggtgattgacttaggcatgcaactgttgattcaagttagcaaatcatacgatagaatattagatactccatagctcactaaacagcatctatttcttcgaggccatcgaatttcaataaactcagccctgcaaggctgaaatgcgtatgatacacatccaccatatttcccggtcgatcagcaaagccaccagcatcggggtcctacgtaatggttagcaagagactacaagacacaataggcaattaaccaacctggcattgtaggacaaatgcggcaagcttatcgccatcgatccagtgcagacggtcgatcatggcaaggcttgatcctacccaccagctatagcaggcatctgcaagcttctctggtcgaccattgaaaccaccgctttcgatctggcgctcactgagccaagctccgagtcgatccttattcaccaagtctaagcgaccagcgatggccaacgcgccaatgcaggtgaatacctgaccagcgtgggactcggcaccggggcgaatgccataagctccatccaagttctcacaactttgaatgtgagcaacggctttggggacatcgactaggtccatcagacgcaacagtgacaaggcattgagggcaccatataagaatcgggtatctgtttcgccccactggtctcccatgaaggagccatctgcattttgtaggtttgcaatgactgtaagtaatagtttagtaaaccatccttgatatcagtaagtataagggaattctgtacaagacccaactttctccttgccgcctcgaccccgcttctcaagttcatccacagcatcaatggttacgaggatctgaacggcagagacagtatataacatatgggcatcatgacccggggcagcaccgaagcctccattctcattttggcatgaaaggacaaagtcgatggtctcatctcgaggtaaggtatccggatgacctaggatatgcagggctgtaagaccccaatatacaccgtttagtcgtaggtgctcggtcagccaatattccagctcatctttccgctgtgtcggtcaatcatcaccattcacccaacattttctttcaaggagcacgcacagtgtccaggttcttgatgtaagtaacatgctttgaggtgtgtagttcagagtctgcggggctgaccccggctctaccagggcccgatactagggccatgtcttggaatgatggaggtggctgattagaggggggacactgattggatagtggatgtgcaggttagtagatcgaaggatctgagagcttgtgaaattattaatgttcttagtagaaggcggtgaagttgtcagctagatcctttatgcacgacactgtgcacaaaacgtggcttgactttttgatggaagaagaagaaagcggttagtgggattcaaagattatttttggaatacttggcccgtgaccgctcacgtgaaagtcacgtgcgatgggtctcggttaataataactatcttatcgattgtataactactcctgacaagccctaaaaggttgttatgttgtacattctgccactatataatcaacactgattggtagaaacccaatcatatccactcagcatgccctgtgcaccacgctcaaagcactgtcatccccgaggcgctagtttgacatctccagccatgtttcagattggatggaacctcaaatgagaggaatgcgaaagcgagggcggtgtgtcagagaaccttgtgagccaggaataggtaataggaattgtatccaagggtgtcgaagtataactaatagaaattgtgcgggtatagttattgcatgcagattaatatcaaacacaatctattttttctctctagcgccccggagtattatcagcgttgtagctccgagtcttcccatgttatacaaagtttggtgaacaacgcagacggacctcgggaaacctctctgtttctaaaaatgtctctaaaacaggaattgagccatggcctgagtcttcatcggtaagcgggaatatgggttccaaggttcgacccgagacccaggctactatattaatttataaaagtggacgcggcacttcggacacggacacgtttgtgcattaatttagctcttacccctgatatacaacgggtttgtgaaatagatatagagtattaatggctgattaccttgaatgctatagatagactatttggccctgtatgtatatttgtacgcttctatagtaaccataaacaaccccaatcccaaccgtggatattccggcaaggaaaatcaggtactgttttattgcactgtaactggctcgccgatttaccaatgacaggccacatccactgtaacgtaaggcaacacattccgtggctctgacctacaaaagtggagagctctgatcattcgtgtactccggatggagtacagcccactatcgtatcgagtacattcgaactaagcaaatagaatctcatgccgtaaagctccagtgtcttgggtttggaggtgacgcgaatgtcaattgagtaattattattcatggaagttaagatatttatgatgcttatccaccgtcacattcggatcatcgcaaggtgttgggtctaagtgacgtttcgcccttcaggggggatcagataggaattaatattcccctctttttttcatagaattgtttgttgtatgttgtagatgttgcagtaagaagattatatggaaatgtttcaagtcaatataattgtgataattccaattttaattctcaaatcataactaattcttatactaatacctaataactatctctgatatgatctaataattatgacttctataatactagcgcggctggtctgatagtctctgctcggactagtgtaccgctaagtctattaggagaaacttggactttggcgacttttttttgtttacaattctgcaattcctcacctttcacatctccgacttcgacaactcctacataatacatacatcataccctgggatcactaattgtttcttttgactttgatccacacgactcctatctcgccccttccctgccgatcccttgaacttcgaagcgcccaaaaagagggggaaaacgtgaactcgcactgaacaagcccccgtctctcaaaacgtggagatatcggtgggaataatcgaacccataatatgaggcttttggtgagtgatcaacggacaatcaggacccgtccattgtttctaccatctccttcctagccttggctgtcaacaaagggtcgaggtgtggcttcttttaactcgggctttgcctgcatatgtcacctgcggtctcacctcttgtcttcttttctgactcttctgtttcctctcacttgtctctgatattgcgctgaccctataactggcgctccagatcccgcatcctcgatacttcgtttaatcccatactactttcgtcattacactggacgttcaggtagacaacattgcctatctcctagtactcctcagcttggaatccccttcgcgccccccactacacggccagacctcgatcattgatccccgtacaaatctctcagtcgcatgcctgacgtcggctttaaagctggccaagtacacatctagcagcccaaggatcaattcatctgaagctccaccaattcttgacccccaagccttcaccatcctggatcgggtctaattgccgcccaacatgtcgaagcgaatgtccacagtgcccaacctcgatctgagctcgtgcaagaccgactcgaagaaggataaagcctcatcgcctgtgacgccatgtgaccgtagttcagacggaccaagccccttaacaccgcgttcgcccaagtctacatcgagctctccactcttcaaaggcgcaacaattcgccctgtcgcgcaggactccgacaataaggcaaccagccctattctcccacatactcctggcatagagcctccgacacccggattcacagcgattcctcaacatttcccttctcccaaagactcaaggcatacgcgcgatgcctcgaaatcatttttcggcaacctcaaagcaccgaaaccatcccacaagtcacaacattcagatagctcggagaactccaccgaacatcccaagagtagaggcagctccagagaacggaagatgccaatggcttccaaacagtacgagtcaacgcctgaccttctaggggcacctgcccgtacgaatggaaccgaaaggactagtgagttcccctcgcgacttatgtgtagatcatatctaacaaaagattacagacggactctcaggccaaaatgattcgcagcaaacaggcgccaagaaagtcggtacggatttagagtccaccgcgccgaagaaaaacaaacaacgatttgcaaaccttttgacccgatctcgctctattcgagttgacgactcctccggacccagaccaccccgccggcgcccctctactggtcttgcgaaactcgaagagttcagtcaaggcgcaacgacgaccgcgaatccaccccgttgcgcgactgcgcgacccgaacgtggaggcttgcagcctcccgagcgccaagccgacaccacctctttgcgaaaagagcgtagccacggtaatatggtcgcgtcgggttcgttgagtcaagtttccggcgcctcggctgccattttcaacaatctgaagtcttcatcaagcggcactgcagatcgtattggcaaggccgggaaaggattctttagcaagatcacccgtagcggcagcacgaatgagagagatatgatcaccgatgattcgtacacgtgctcagtgatcaacctaccgctcattgagcaggcgagaaagactcgcattgcgaagaagctcgaagactgccgagacaagaccgagttctggatgcctgccttgccataccgctcaattgattatctaaacttcaagggttgcgaggaagagggcctttaccgtgttcccggtagtggcagggaggtcaagcactggcaaagaagatttgacacagaactcgacatcgatctcttcgaagcccctaatctatatgacattaatacggtcggatccctcttcaaagcttggcttcgtgagcttccagatgagcttttccccaagtcaacgcaaacgatgattgctatgaagtgcgaaggtgccaagaccgcaccacagctactcaaagacgagctctccaagttaccgccttaccattactatctcctcttcgccatcacctgccacctcaacctccttcactcgtacgtggaccagaacaaaatggactaccgcaacttgtgcatctgcttccagccctgcatgaagatcgacgcattctgtttccaattcttagtatgtgactggaagaactgctggcagggttgctggaccgagaaggaataccttgaacttgagaaaaagatggacgagcgcgacctgcgagtctcagaagagcaggaggccgccaaggcgaaggagcgggcctctggcagccacgaacgcgcagtctcgtcttccagcagcagcgctggggaagaagctcgtcagcctcttcgtcagcccttgcgccagcctgctcgtgaaacatcccgtgaaccatctcgtgagccaccccgcccagaaactgctcgccccgaaaccgctcgcccagcaatggctcgcccagaaattgttcgcccatccactgctcgcacccgaaaggccccgccgaagaatatcgagacgggacacacccggagcatctcccagcttcccgagcttggcccgccgctctctcctatcaaaatttaaatgcgaaagacgtctttcttggcatagatatgtctcagatgaaaacagcttcacgtcgttatctaccttttatgacctgcttccaatttggctggcccattttcctttctatctgcaggaccagataggattggacaagttgtttcagaatggaactaccttccaccaccacttttccctctccccatacttccgatacaatacctccatcgcctactaaccgtatgattgatggatatccccattcccatttggtctcatatagggatcagatgttctacaatattcccctttgatgtgtacatcttttgctctcttggcattttctctgaaattggcgaatggccggccgtttcgtttactcgtgctatactgcttgactcgcattgtttctccctccttttttgctgtctcttgtctatttggaagcgcagcaaatctcattccatgctttgcttgatattgcaacatctccagattcccctctgcggttgacattgatttccatcatcgctatttgctccatgcccgtttgcttcgttttgaaatggggtctacatttacattttgctcatttttgtttaaattatgtatctagcgtttcctttcgaggattgtacaatagagaaagcgggaaggctcactgttcggttcgagcaagatcatttctggtacaataatccccatagcctcacacagataatcaaaaatattgagctatctagtaaaggccatcgcaaatatcgacagatgcaataagagtgcttttggtgaatcacggtaggtccacaatatatgaagaatcccattcgactcccaaccccaacgccagagatgtaaaacgaatcaagacaggatagccagaggccataaaataagcgtgaaaaagaaaagaaaagagcacagaagaacccgatataaccagctcaatcaatgacaccctctcacttcgcacgagcagggttcgacctcttctcattcgaccgctgcttgcgctcattacgcttaatacggtccttgcgctcagtccgcgacataccgcgaatgttacttccctcggcattagcctcgccctctttcttccacttcttcatatcaacctcaacaagccattggttctcgtcgtccttgttcttgcccttgtaaccccagcgcggcacccactcgcccgaagcctcgtcgtattgcagcttcttgcggcgctccttgtcctggcccgcagcaccgggctgctggctgtacttgccgatgcccttcttgcgggcgaacagctcccatttcgtgggtgccttggggacgggcaccggcttgtggcgagggaggtggatgttcggcgctggcagggtgagaagaacgccgtcggagacggaggtcttgatctcgcaagttgtcaggagctggttgagcaggacttggacgccgtcgcgggctgttgctttcagcgagtcgttcagggtttggtctgcggggagctccaatgggttggggtcattgacgagcaggtggcccaggtcgaatgtgtagggggtgggctttgagacggtgattggcctgggcatggacgttagtttctatatttttcttcgttttctcttcttggctttttggtcgtgtatgcggttcggaaggagttcttacagtctctcggtcttggaaccagccgcaggcttgggcgcggagttcgccatctcgatatcagacatagcaatactgtagtattggtagactgttgatgttcaaaggttggtatcagcccgaagaaaaaaaaagttggttatcagatacagccgcttttgcttttctgccatgactaaggcttcccgaccgcctttccttctcagggcgggcggatttcgcatcaaattattgaccgaagtgttaactgctgttgttctctcaactcaattcccacccacttctccatctcagcaccggttgtcccctcactggctgcgccggtgtgactgacaacaatggcctcctcgtggtgctggaattgcctctcgaggcttcgcccgacaccgcgagcactcctcccgccgtccgcaacgccccggatttcgagcgcctccttccactccactgccgtgcactatgccctgccggccaagaagaagggagctagcttgacctccatgaagcacagacagtcaaccagcttgagaaggaagaagaagaaggtcactgaccgcggcggacgccccccagccgtgggtgagcgcaaggccttgcggaaacgcattgtcctgagcaaccccaatgcccttgagattgagggcatgctggagctgtccccggagactatggttgattcccgtctccgtggtaccgtcctgggattgcctgtgccgatgatcgatcaattgagagcagtgcaagccttcaagcccaaacagggctggtcgatattccgccggcctggaacagtccttcgacgtgataccattgagatgggtcgtttgtttgagcagatttctggggatgccgatgaggcccagaagggcaaggttgtcaagaaaattgttactggtatgaagggatctggcaagaccgtgcacttgctgcaggctatggccatgggcttcttgaagaagtgggctgttatcactattcccgatggtatgtgtatttgctgtgtatattcaattttgcagctgctgacctgtcactcttgcagcccgagatcttgtgtccggtgaattcgcctacgccgctatcgaagatagcaacccgctgaagtatgtccagcctactgcaacctcggctctgttgactcgcaccgtcgatgccaaccgggagctcttggctagcctgaaggtttcccagaaacacccgagtctgaagatgctgaagccttcctcgacccttgaagacctcgccaagcttggattcactgatcctgctgtcgcctggcgggtcttccaggccctttggactgagcttactgctactgcccccgccgcaggattggagaaggacttccagccccgtcctcctatgcttgttaccgtggatggtttggcccactggatgaccgagagtgcctaccgctccgctgaacacaagccgatccatgcgcacgacctcattttcgtccaccacttcctctcattgctgaaggagggtgaatccctgaagaatggcggtctcctcctttacgccacctcatgctcgaacaaccccaaccccgagggtctcaaaattgctctggaccgcttggccgcccgtcaggccggtatcagtgcctcctcgccggaattcccgcaactaccagcctacagcgatgccgatcctcgcgtcgtggacttcttccaccccgcagagaaggctgtcagcccactcgagttgcagacgctgggcggcctcactcgcgacgaggctcgtggtttcatggagtactttgcccgcagcggcctgctgcgtgagatcatcaatgaccagtgggtgagcgagaagtggagcttgtctggcggcggtatcatcggcgagctggagaagttcggccgtcgtgttcgcgccactgcttctgtctcgaaataagggttctatcttgcatttctttctcttgtcttatctccggctttcagatttgtgtttcacgtttacaactgtatatcggatcctggggttttccttgtgtgttctttgcccatgtattttacaaatctcacttggtccgcttgtgtctgtatgcatataatggatttgttttggaaaagttttatattcttcgtctcttgcacctacacgataacgaaagactaatccgaacaatagagactcgacgttgaatcgatcctctagttcacatccaatccagcaacacctcacgcatccaacttcttcggcctaggcgcacgtaccaaatcaggataatcaaacttagccgccacattcaggaaagacgaattagccgggtgcgcctccttacgcacatcatccccacgacacaaaaagttcatcgggaagccaacatcaaactcataagccccctcaatctccgccaaatcctcatccgacaaatcaaccccaagcccctcaatattacccaacaaatgctcaaccgtacgcccgcccacaatcggcaccacgtacggcgccttgcgcatcacatacgccaacgcaacgctggtcaaagcagttccacgccgacccgcaacagcctccaacaccttcgacaccgcaacatcctgctccgtcactggattctgtcgtccggggttcccgctgcgggcgatgtcttcccgctgcgcggttgttttgaatgcgccgccgccgagagaggcccagggtgcgaggcccatgccttcggacgcggccatggggataatgtctcgctcgaaatcgcgcgttgcggcgttccacttaccctggtagacggagaaggggcggaggccgtgatcgcgtgcgtctgtggttttggttttggttaatttggccttggacttggtttgggggagtagtggtaatagccagctgtaatgtaaaacttacattgattcgccttgctcacgatccatgcgggggtatcgctgatacccaagtatagaaccttcccggctaagaccagctggttgagggaggtcatgacctcctcgatggaagtgctgaaatcccaccagtggacgtagagctatatatacggaagttgttggttagtatagtctcggtgagtaagtaagccggaagaagcgagcagccacgtactagatcgatatactccgtccgcaatttcttcagactcgcttcgacagacagcttcagactcttggcattattgccgacgaagttcgcctggatctcagacttgttgtgcgtgcggtagggcgaggtatactttgtcgcgaggacgatttggtcgcgcacgccgcgggcttccatccactcaccgagccatttttcggattcttcggcttggtagttgttggctctttggattttgttagtgattagatcctttgggaatattcaagactgattgattggtaatatgcatacgtgtcgatgaagttacctccgttctcgtagtatgtatccaggatcttgaaagaggtctctttgttgcattcgccgaggcgttctttcctgttttagtgtaagttatattgtgtttggatatataaggtaggtattctacgtaccagccatcgccgaagttcatcgctcccaggcatagtgggcttactttgacaccggcagtgggcgctaacagccggtagcggccgagatgggactttggggtggcagctggggcaaacatgatggaaagggggattcagggtaatttagtatagaattaaggattgaagatcaagagactcaggagaatctctttcctttatagccgaagtcattatatgcggggttgaatgtgctcataatccggtggttgcatcgaggtgtagcatgatgcctttaattcctaagtccggccaaagcaggatttggggggaagggggggggggatttagggttaactccggttttatgcaataaatgctacttgtttactctctcgcatgttgaagtaatgaaataagccctcgttctatttatagctcagatcccgtagaacttcaactggacactatatacggggctatccctgtcccatctccagaatactcctcctcagtcgcctcctcagtcgcctcgtcagtctcggattccgggtcatcgagatcgtagaattggtcatatatatcatccacaatctctcggtactccatcaaatagtcatcaagttctgaatcgccctctccgagaacaccaccccaagtttcctgctttgggggaatcaccactggacctggtgtccaatcagcattcctattatcctgagtagcatcgccaacagacacagatctagccttccccttatcaatagaaggagcaacccccctgccttggcatcgagggcactcgcagttctttccaaaaagctgcacggcatgcatattgagatcgagcttttcgccgacgggatcagcgatcctataacgttgatagggaattctgatttcttccccggctttgatatccttgttcgcccagatcactacgcggttggggaccttgtcatcgtatccccacagtgcgttctcgaaagggcgacaggaatgattgaacatgcttaacccgggaaagaggtagaagtttccaaacgatggctccattgccgagatgtcttcttttttctctctcattctactctgtagagttgggtgcagtacaggtttgggaccatcacggtccttgaacgttgggtttgcacctcgtcgcgtatgttcccagggtacagcattgactagcaacttccgcagcaccgtctgaataacccaagtatcgaaggagaggtcgctgaatatgtccactccaaggttggagaggatatcaaaaggtacctggatattcccggccagagtaaaagggaaccagctgtccctccagggctcgttcgtatcggtacctgcctcgagaacgaggagtccgttgatctcatgcgcgagaagattagggtcctcttggcggcgatggagcgtaagttcaagcacactcttcaagagtagactcaaaatagtcccgtggcgttcattggtgtgggtgaaatactgcgatccgccccatgccactttatttggtcgcatggcatcgtgcaaccatccccaatcgagaccgcagaattctttgaaatggtatgtttcgcgcgcaatatccaagcaatgaggagccactccgtctgatattgcatcattgggaaaacagaacagcagaccgcccctagtagctctggagtaacctacatccacacatttacatattatgtcaaggcacgcgcaatcatccgggtgtttccgtccggaaagaggtgccgggttacgaatggagttccagttgtgctcgatatgccgaaccaagtcagggttaatcacggcttgacagttgtcacatcgtggggcatggagagggtcttcactttcatcgtcaagcagcctgttggggatgagatttccgcgaataactggttcctcgtagtgaatcatggttcctgctttgatgtttgcagtggcaaagacccctaaaccattgaaggaattgtcctctctgagggtgggctgcacctggcatgtccgttggaaagacttccccgcattgccactgaccgtgaagatatttgcattgagtgcattgataaaatatggtgcctcgcgtctcacgtctgcttggtcgtatggatatctatcggcgcctgaaatccatccgcggctccactcatgtccataaagggatggatgaagcgctgacggattatctcttctgtgctcgatccccgctctcacaggagcgctcactgtcatccttttcttaggaactgacatatcgcggtatgacaggggtctttggagttgacccttcatatggtcttcgaaatcatcccaacaattcagtgctgcgaggctgagactggtgatgctgtgaagggcgttcctcagagttgggatgaaatagttgataccgtttgccttcctcatttgcaggacctcccttgtcattgggactcccttgatcttcaattctaccatcaggtgctgctggatggcgtcccaaacacgggtatacattcctggccgcttgttcctttgggttgctgtcgtcaacacttcgcagagaagctctccgcgataggcgtctccaatggcgagatcgaaatagcccagcagataatgacaataagcacggctgttccagtaagttggattgtacgggctgagtttaattgctgctgtgtacatttcgagtgcagacatatctgttctcgtggcagggctcactacagctcttggctcacgatagataccccaatgactcaggttgctttgtctcaagaccccaaagcgctcatcacattcgtattcccatagacggcgttgtaggtctgtctttctcccatctgtgcttagaccccttaatgtcagttcatcggtgagtgtatctttcgtccaaagacccggatctctgacgttcagcccgtgtacaaaaaccctttgctccaatgcatctagcccctgcacgccgttgtaggtctcatctaagccctccgcggtgaaccgggctcgtgcatcatcacgcgagatcggcagaattggattgctcatcaggtgttcatagacattgtgagccaacgcatgcattaccgattcttcttcttcggttgctcgtgtataaggtcgattcgcatgtgccttccatgcacgtccgagggattcatctggctgctgccaaaatcgacgggcaagaaacgcgttgtcttcagtcaacgccggggctagcggcgctcgattgaaaagatccggccgctttggaaacgagggtggatggacaatgtctccacctgggtagacctcgtataatcgtttcctcggatccatcttgataccttggtggatccagaatagacaatcgttctagggatgggtatgtgaacgtggaaagagtatggcaggtctcaggatttcgatttccttgggccacatgagactgtgagtccaacacagacccatgtagttgccatgggagtatgaatgtcagattagtatcatacttgccgcagatcatggctgaaggaatccccatatcaaagggtcgggagacaaagaaagaggatggtttatttttggagagaacgccgattgagggtatatttcaacaaagaacagtgaaaaacacgtgttcttttggaataaacttgctttcgcaacaaaggaagataacaggtcccttgaataacttcatatcaccaatatgcctcggaggtacttgaaatccactctacttttagcgggaaaaccgccaagtatactccgtactagagatagcaaaacaaaggatgagatgcgactatgggattttctggaaggcttgtaatcctaggcctccaagcccttggatgcattccaatatatacatgtatatatgcccaacgggcagtgcgcggtcgtagttaagaagttgcactggaagtctcgtgggggtgacgaccccgtgctgaccccaaccccaacccaacacgaggatcaacacagccctggaggaatccttcggcaccttgaaaagaccggactcttgaaatattctcatgtcttgtctttctaaagtgctctgattcatcttaccatgcacggacagtctggtcctccctcacagccagaatggcgacttcctccgcgtctctcctcgccgtcgcaaccagggcctcctccgcctccacgtcccccggttgcttcatatgcaccagctgttcaatattcgccggctgctccatattcgccagccaactatggaccgatttcaaatccacagagactgccatcaccgagtgcgggtgcggatacaaccacgtggggagtgcggttcaaccagagctccggccccccattgccggtaagtcgaacgttagaaattcaaagtcgcataactaacagtcgcatagcctcgaccttccagtacaaatgagcaacggtacgcctatgcgcaatctcagtcgtatccatctgtcgcaactccttttcacggaatccaaccctctccccccccaccttcatatacaacactaccaccaccaccatctggtgttccacaaccgccgccaaaaatcccacaaggcactcaacatgtagcgggccaacaaggcgatcagacggggcgagctccactgctcgcccagggcgcaggagcggctgcgatgtctgggtcttacgaattccgccctgcgcctaccctcaatacaaatactacatctgtcagcgcatcggctctgggccctggaactccatcggattgggagcattttggcccaacccctgggcactttgatgatgcagcgtggttcccacctcgcaggacgccctctctgcatcacgaagggtctcaaccaccatcaaagcttccggacaatgttcccaacgtgtctgtggaagacgagtcggacattgttgctcgcccgagaacagatacaaatcaaacgcttccaagtattgtctctggggtcacacagtcgggacagggtggctcaaattcgcccgtcagtccatgcacaacacatggaataccaacaccgccccaactggtccgcacggataccaccagctctgccttgtctacaggtggacgttcagaaagcatcgatgatgtaataaatgcatgggttcgcccattatcgcctgcgcataaaccagttcaaccggaacatcaaggcctccccggcgcgttctaccagactagcccagtagagcgcccgcagtcaacgcaaaacagctcgtcatttttcgaccatttgcagtcgggctcgaatggttctgcgcaagtggtcgaaggacccagaagggtggctacgccagtaaaccaagaccccttcgaagatctggacccctgggccaaatcatcgttggaaagatatgtcgccatgctacgtaaggaggcagtggctgacttagatgaagaacgatataaaatcttcacggcttttatggccaaagagactaagctccggcagattctctataatattgagcctgagcctgaaagtaaatcgctgactctgcaagctcctaatcctgcccctcctcagccgctaccaacttccaataaaggcgaaccagctgttgagtcgggactgatacccgttgcgtcagaagaaattcctccctcggcggcaacggcaacagaggatgaagatctcgatgatgttggcagtgagtacagttcaggtggtcgtcctctgctcgttaagaaagcgcaaggaggctcgcaggctgttctgggcttacctactgcgccctcgggcgcagagtcgaatccctcaagacccttatcgatcatatcgatggatacgcagaagcaagtcttggaacccttgactacgaaccccccgcggcctatatacacgccattccagtatacagagggtccccagcgaggctcggacaacctcacctttgctcgcccagcatatcaaggctattctgacctgcggcaagcagctgtcagtgggcgagtcatgtcaaatgcaccagcaccagcacctacatctcgatcgaactcaaatactgcacttgcttcttccgcgcagaaagatcccgacgagacctttttgggtctaattcgtcacaagagcgtcgcttattctaaaccggctgagcgaaactctccaccggttccattgctgccagaaactcttcgtcaaggccggtcgaggggcctcgtggaagaattacgcaccatattacggacacccttggacaaacggtctgaaagctcatggcacatcatgactcgggaagaacttgaaaaatttcctgatgatttttcgtacattcgacggaccgttgatcaatgggaggaaacagcacgagccagacggcaaaatctggaacacgagcgcatggctcgtcaggatgaatctgagcggcacatcgatgatcttttcaatgggaaagagatcgggtatgcagacatcaataccttggaagaagaatttcggcaaagcgaagctcgggtccaattagaggaggaacgacacgaagtagacgatttcatgacacatgtgttcaatcctttagatgaaggcctaaaaaatgagatttcggcacttcgcaagtcctatgactctgctctcaatcaactcgaccttgatcaacagagcaaaggttcaccaagcgagcgaggcagcccatccgtgaccatgaaaattgtcaacgaccttcacaaaaagcttgagatccgattccagaaacgtcttgatatagcccttgactgtgagcaacgacggaagagggctgagcggcgaccacttgtggtcatgggtgatatatcgggtctacaaaaactagacggagagtttgaccaaatggaacggcgaaacattctggaagcgtgcaaggatcgtgatgatcgagccaaccgactcatggattccttcgacgacgcaatcttgcacgggctaggtttaaatcagagcctcctggacgaggttgcgtcgagaacagcccgactagataccgccaccttccgagcctccggtctaccgcgctctgaaattgggcagattctcaaatccgcggcaacctttgcggcgtcgctcggagctgattcggaggccatcatccgcagcgctggggttgcagacatgatcctaaacgacgccgactatggagtctccgtcgctgaagcgcgttatgccaactcagatccggagattttccatcggctgggggctgagaagataaaagaggatgagaagatccagggtgaaatgaattcaaagttgcagagcattcaagaggggcctgtgcagatcgaggccaccattcaacgtcttctccttggcttgcacaacgacccacaagccgctgcccctgtctctccagttcaaggcttctcctcaacgagcccatctggggaagtgcctctacatcctccaagtcttcgcccttcgactactagcccgggtccatctcccagtcccgcgcccgtgagccaaactacggatgaagacttggaacataaacagaggcttcgcagagcattagaggcagccaagcagcgcaacgctgccaggggccattgaccgagttggggggccgaatggaacatccacgacgcgacgaattgtgatgaatttccttgcgtttctagcataccattttatctgtttccttgtcctgtccttcaaatgttgtgtttctgctgtcacgcatttttggttgatacccactttatgcaactagttaaatgaagactgccccatgacattcattcgttctttctctaatcaatcaacctctgtatccaagattggttccgcttactccaatcctcgacctcgttcgcctattaggattagtagaattcgaaaacagattacccttgagacattcatgctttctttcaaatcgttgccagattgcgctaaacttcattcagtcaaggaaagtcctacattgttttcgtgatgtaactctacctagggaggggcgagtttacaaacattgaacatttgaagcgggggcttgggcatctttcaaaatattcactttcccgttatccaaaaactcaaccagttgacttcattgcttgctcaaattgaatccacatccagttcacaatgcaaccaatttctagagttgactgggacaaaggtgataatgatgggcttgtcactgtcggttcccataacctctacctgtccgtttcggggccagatcgcaagcctggagagcctatcgttgttctcatgcaaggccttggcagcacggtcgatgagtggattgcagtgcgaaagcttgtggttccatttgctcgttggttgaactatgatcgttcagggttgggtaggagtgaaggtcccaaccaaacaccaccaagcatatctgcagcatcagtcgcagcagatcttgatacacttctaagaaacgccagtattgagcctccgtttatcattgtcgcccactcatggggaggctacacttctcgcgagtttctggaactcaggcccaatgatgtcgtgggcatggtgttcgtggattgcaatactgaacgtttatttgacagtggtgcgtggggttgggacgttttcggtccagtcctcggtgaccaagactttgttgaaaccaccggtcttgcaacgtcccatgtcctatccgaggaggagtggaaagccgtcagagaccagcaggctaatccccgacatggacctaccgaggctgctgagttgcaggcggtgccgaataacagacgggcattggcccacaagaatcaacttgaaaagctacttctcaaggattatccggtcagtgtcatcattgcggatacacctaaagatttccagaaaatgtatgactttggagtggccgcaggcaatggaaccgaacaagaacgagctctgtttcgaaaatgtctcgatagatggcgcgagatgaatgaggactggcaaagagatcttttgaggctttctcgtctcagcagatctgttcgtctgcattgcagtcacaatgtgcagcttttacaaccacagagcatagttcaagaaatacagtggaccatagacagctgcagataaccctcaatctgctaataaagccttgagctcccggcttgcaaatcggaccctccaatgatgtgaccttggcttttgatccttaataaagaatttggagcctcgaaggaatggtgcgtggttgcgaccgggcaggtgcgtccgaatattgctggtggagggccattttcagcgtcaggaagtgccagtttcggccgtcccagcacaaatggtttctgtttagggggtaaattgtctattttgattattttgtctcgtgcaattagtttatagccaattcctgctgtgtgaaccccggttattgtctgctttcttctaactgtattcgagtttataatattctaagattgtatgtttgtcgaagtatacgccttgttcgggtcaacagcacaaaatttgacggagtctttttcccgatgttacacaaagaaccttttgcattgtattgttggctataaacatcagcaccatagcattatgtcttaaccacctccagagttcgcaggacgactttggtaattgaaccagtggttgacatcatacattctttcccccttcagaagacccgtaagattgcgatacagtttgacggccatgctgattttgctttctcctcccttcgcgccactgtggctgcgtcacgtacaggaggaattctgtcaagtgatccaacgtgcaggacaaaaaagaacggcgcacagacgatatctccgaaccctcagcgagccaaacccaagaaagttagccatcacctagggcttgtgtgaatctgaccatttctaggcgccgagggatggcgattggcagacgataaagccgagccagagagctaaacgccaatttctgccgatcaacgctgttgcgcagtcaaaagtggctgccgcagctcgaccggtccttgtctcaagctgccccgcattaacttgcagggatggaggattacctctaaacccaatacccaatatggcgggtcttgctgtgccgcacagttccctgcgtgccgcgctcggattcgctacgctttcgcactatacaatggatatcgtcaccatcccggacacgccgctacagcatagtctcctgcgcaggatttttggaccacttgacatgtcgacttcggttacagctcggtgatccactctttggtgatttgtctgcgcgatatgcaaggcagacccctgctatcaccaacacatctatgatcctggagacctcgaatagtgtctgaggactttgcggcgtatgggcttgcttatcctcggctgtgctcgccggccttgggagtcaagagcctcagaattctcatgggagtgtctccatgtcttccgagccaatgaccatcctcgtttgggatagtctgtcacattcgaccacgttgatggacagggatactgcgctttctttgtttttctctttgagggttgttgcgtggcacctggacaaagaaagcatcgggtgacctatccgagagccagcatcctaataattctccactatggaaaataccaaggtgcaatcctggccacagaaaaggaacttatctgaatggtggacccaagtgaggctgctctggagcttggaaacaatttccaattccttttcggtttctcgggcggcgatcgcagcttgtgcctttgtggtttgacctttggagtgtacgggaagcacgggaagtactattcccgttatctcgtgcctgcccttttctctgccctttttccctgcgtcggggtcaatatctatgccgccaacagcgtctacatgcaaatacgagatgcaagctttgcattggccaactgtagaatcagccactgtgcggctctcgggcatcaacagacaacataccatgatttttaactttcagtcgattccagtcacattcttttcagttgcatgcattgctctcggacaaaagagcgcagcatctttacgagacatggccctgtgttccccggagaccgccgtagccatgcccgaggtcagaatttgttttcgggtgccaaccactaaaccccagatcttaccacaagatcccccattagtggatgtctgtgcgctgtgcgatgatgctgatcctatgagacggtactaggattaaacggcgcggccttgtcgagacatcaccccttccttttcctcctgcggcacctcccattgaggctccaaatcccccccccctctttgcgatctgagcactcacctttcactaagcgctgttgggtgggaaaaaaaaaaacctggcaaatccaaagatcgatttccagccggaaaggtcggagatacaattattttgcgcagtcgaaatgaggacaaagacatgaaaagcattgtgtctcttcaatggcccctgattatttaaagcgggcgccagggaagccagttccatggttcagtgtacccgcttccgtccatgggtcgggagaactctgtgagtctaccaaagtccaccgtgtgggaaaatacgctgctcttcgaattccgtagcccctcttttgatttctggaggggacgcctgtcttctctcttttcttttcgccatgtccgctccaacgggccaattccacaggctgtccattggtcgaaatatgccagatacggccttgcctactagaacggcccgcacggggcggtcggactcttccagcgacgaaagtgatcatggagaggctgatagctcttcggagagctctagcgatggagaagaaggggacgagggtgagggcgaagaaagcagcggtgacgaaccgtccgaatcgaacagcgcctccgtcctcgcaacatccggcatcacctatgatctcagtcaactagattccgaggctgaagccagggcctttgtgggcttgaccggccatttcgatgttgtcaactgtcgctctacccccgccgggtatgacttccagctgtcggatcggccacaggtgcacatcggcgcggactcgtctacctgcacttgcgcggccttccaggatcgaccggacggcgcgtgccagcacatctttgtgagtgtgcctttttgggaaaagaagcttaaaacttgaagggcttgaactgccgatactaatccccatcccctgaacagtggctcgtcgatcaactgcacggctgcttcctccccatgcctcggtctacggaggtggcactgactccagatggacgtccggaccgtctccctcgcattgaggaccttttgcaggggaatctgatgtcggttgcaacgcagctcaaatggccgtaccaacgggacgaggaggacggcatgacgcggacagaaaaggtccgggacattttctctgcgttcagcaaccggactctcccagaagacactcgccgggacttgacagagacaaccgagcaagcacgaaccgcagagcagtgcgtggtgcaaggggatttcgaagcgaccatgttccgactcgcagtgcacgatgacggggttttcaacagcctatgcaaggcgatgcccgccggcgcgtgtgcggccatctacttcgacaaaatacaagagcagtcacgccgactactgagcgacttcgaccgatactgtgcaaccggtgagttgccggcgaaccccgtggtcccaggtttgggtgtagaggtcaacgacgttgtaacccatctccagcgttctgtgtcccgcattgcagccaacatcaccgcacgcgcccctcacggctctgaaagcgcggccgaagccctggtgtctcttctagagtcagtcgtggctcgcaataatgatcccctcgaaggcaatccccagggtcgccggtctttccacggcgaggacgaggaccagcgcaatctgtatcacttgctcatcgggtcggtcgaaacagactccgaaacagacgcgcggcactttgtccttcacgcgcttgatgccctgccgccggtggacctccaccagtgcgccaaccgcctgcgcgatatcctccgcaagatcgaagtcaaccgtgctccgaagccatatcttctccatctaggctcgttgatccgtaccggcgaatcagccgccaccactgcgatgggatctggacaaaagcgaccggcggctgggaatgggaattctgggggttcaaaacgaacccgctgattcgttctcaatctttttttatacatatgtttgttatattgttctgggaggccatcgtgttcattcattgcgataccccgctgcatcgtgtctttgcgtttcatcagcgacggatcgcttcaggtctattttgcttctcggtcatggcaatcatttacgtgtttgatgtctactatctaatatacgatcataagagctgctagcattgctatagccattggcatatacaatgaccctcacagacagcgcagacaaagtttccaatccaccagagctaccaatgtctataaccatgtaaaatgcaaaatgcaaaatgcaagtctcatgagaaagatgtcgtcattcccagtcagcacggccttgggaccccacgtctaccgtgagccgggtgtcaccgctgccacgggcagggattagttagcccgatttccaatgccgaaccatggtacaactctcggtagcgtgtgggtcgcccacactttgaaaaactctcaattttcttcttcgggcgcccagcaaaagcacgcgaatcagcgcaaagaccgaaataaaccttgcaaataccgagatcaagatcggaacgcatccatggaaacgtagatctgagatccagatccgttcgatcgcttcgcacatctacgcgtacattttgggggacggatattggatatcactacggggaccactcaatttcaatttcaatttcaattcaatctcaatgtgcccctcaatccaacgcccaatgcaccagttaatttcgataacactcaccaataacgtgtctcgaaaatgcggtgtcctctatgctcatcgtacgattaggcatacatgcccatgcgatatttggcggtgagggtttattaggcactcagaagtggatattacgagtgatatagtcgttgcagagcaaagcgactgattctaacttctaatgctgcgcaaagcccctcttactggcttattggcttcacagcaacccctcagctacaactcctctgcttttgtcataattcagccgaaacttgtccacgtgaccttgcccggtcacctgacgctgcattaaaacgctattatttcagccccattaggagaaaccatggacacgtgacacgtacgtaagatcttctgatttatacttgcttcgcttcgctccgcaatcatgccatgtcgatgttttcgacagggattgatgcccaggtgtgcgactaggaccggctaggaggtgtttagaccgtggatgccaatttttgggcccgtgcacacggtttgggggctagtgcttagggctgtgtttagctttggggtggacctacagggatgttgtataacttgacaatggtattgtatgccggatctacatatctgtatcacgatacaatgtcggccatgagaaggtgtaagatcgttttcttggccgatttatctttgagcaatcgggtttgggaaatattattgtagtaaatcactgagagtatgaaaaactccctgtagtatcaatcatttgcacaagactaatccgaggagtccctcttcaataatctgagtattaatcccttcaaagtatccaaatgatcttcgtggggatcttctgaagatctgaaaatctgaaaatctgcgtcccgttcaagtagaagccccaggcaagagggtcttactacgaggtgctgaatgagcgttcgcctcgaggtcagggtagtgaagactgttacaaatatagccgcgaaacgccgctagaataattgggatagatgatagacaatattttatgcggatggctttgatttttgaacgcatgtgtcttcgataggaagtcagctcttgagagtttgcatggctttgctaccttctcaaggttgcttgacttggccatgatattactcaagagtgattatgagacgcatgatgcatcgtctgaacaggtatgtacctgggtacatagtggaaggcgagaatggtgattggatagatgataaaaaaccaataagtatccgttggttaagtatcaaagtcagtggggcacgagaaaggatacccagtggcctagttggtaactctatcgaacagtacctgctctaaactaccctctaggtcatgtcgagaattacgcactcacggatctgggttcgtttgtccactttttttatactttttttttctctctccctacttctgttatatgataacagttttttgctcttcgtacgctttcaattttgcagatgacattcagcattctatcgaggcatccactgtatgtcaacaacatgaactccagtatcaaaatgcgcgtcattcatactattggccttggcctgggcgttctttgaaatctccagtgtagatcattgcatagtcgccagatggtcatgtatatcaacgaagttgttccgatccatcgtctcttcgtctccaattaactattctttctctatgtcttgatattcttctttaaaaggtccatttgtcccaaatttaactggccagactgccattttgcttataaagcacactttttctctttcatcaacaaggccggctggcccaatggcaaggcgcttgactacgaatcaagagattgcaggttcgatccctgcgtcggtcacttctttttttgcccatttctttttattcgtctctcgttttgacctttcttttccaatttttgatgtgcaaaatattatagagtgaatataaattgttctcggcatttttggcgaaaaaaactcactcaattggtgcaaaatatcaattatcgaatatagcggttagccgttatatatcctagccataacaccagtcaacaaaccaactttactaggaacgaacgaaaggttcctataacaagatgaaaccagattcatatatacagcattcatccagaaagatccaacacaacccgaccctgcatcttcccctcctcgagctccttgaacaccccagtcaaagcatccatcttctctatccgataatgcaccttaatgacacccctggcagcaaactccatagtctcaatcgcctccttccgactcccaaccgccgacccggtaatagtccactgctggccaaccatcgcagacgggaacgccgtcgcaatagcctgcgggtcatgttccggaatgcccacgcagaccagcgtaccattgaaacgcaacaacgacagcgcctgcgcatacgccgcattcacagccgtacagacaatcgccgcgtgagcgcccagtccatctgccagcgaatgaacgtgcttcgtcagcgcggcgccactatcgtccctcgggaactgcgtgatatccacgaaatgctctgccccagattccttgacgagtccctctttgctgccgtagtcgatgctgattacgcgcaggcccattccccggctcgcgagctgtactgcaaggtggcctagcccgccgccggcaccggagattatcacccactgtccgggccgcgcgttgctacgtttcagtgcggagtatactgttacgccggcgcagagcagtggtgctgccgaggcggagtcgagaccgtctgggataggggttacgtagtttgcgggtcctaatgtgtattgctggaatgttcctggggtatagtagccggagactttctagttgaagcacagtccgtcggagctggcttggcagggttctggatggggggttgttaagttcgaggtgtatatttgggttgttgaggaaagtaaatggtatcgtacggcagtgcccacatgcactggaaacccatttgacaccgactcgatcgccgatctttaggtttgaggattcggtgtctgcaccgagtttgactaccttgccgacaccttcgtggccgcccacttggcctggctgagttgggtgtgggaacgcgcttcactgggtggtattagtaagtacccgagacagagagggtaggatagttatgtgcatactctgttggtcatgatactaaagtccgagtggcacacgccggaatgtgttctatcatcgtcagtactattctagcattgaaatcaagataagaagtacaaattaatgagaacctcgcccgtaccaggctctgggacatctagttccacaatctttgtcgaaaccgtcccaggctggtcgtaaataatggccttctgattggtggggatttcaggagcggccattatgactgattaccggtgacaggttgaaaggaggccagatgttgaactacgaagttaatctcaactgaatttcaagcgtcggagaggtgtctatagagaagatgcttaattgaatgctggaaatggtcttgaatagattgtctcattttgtcaagtagaaaaagaggagaatagcgaagagggtcctgtgatcgaatagcggggtttgggacttttggatcgacggatcaaaggcacacgctggctgtgcatgccgaggaagctggctatccaggcagtcattatgatagtgtttctttgtgctgggatgaagtgaggggtgaaacgcggagccatggaaggacctcggttccataagctgcatacatctgcatccattgctggaatgaacaataaagtcagaggagtggattgtagagagatccaagacgtggaatgttgggagtttatatacattggagaatccccaaggtcctcatccatttgataacattagaaacgtgctatacctcttttcggtttatcttggagaagtgattgcactcaaattatgaacaatacatgtggactaagtatttttattggctaaaatggtgatgatatttttataaagtgcttggcctgaaagtagcagcaaccatcctttgtatctattctgaacctgaaaactgtacatcaacgccccatatttaatggcgcctcgcaaagcctatttaccctgccttgtgtaatttatattgtggacccagtacacattggtaagagggatcaaagaggcttggattgctaactcgtgtttgtacatcaggcagaagggccgaaactgttatattaaagcacagaccacataaaaagggttcccatacaaagattgtttatcggggcgtatccttgaccctggattaggtattcgctggctacagcatcggtgccagcgagcgggacgttccacgtatacgtgtaaccactctgagattgaggcgcgacaccgatagaggaccacgaccactccgcattagatttggatttagaattccaagtgccagtatattcgtaaaacccagagtaaaaggcattgccttcgacaaggtagttgacgatctggtgcaactgggtacctagactgtccaagcctggcttgtccatcggccacccgtggacgggtgttgggttaaatgagtattgatcatcttggttgatgccgatgaatagccgcacaaatgcgtatggtaccaggacgtcggctttgtagacaacggtgtcaccattctgtgtatagctaacattggtgattggaccgtcggacggtaggcttttcgtgctcgccgagatcgtccgggaggagccaccgccactacctgaagctaagaccgtccgtacctcgaaggagataccagaggatccagggtcgagcatgccgaccgtagctcgggtcaatgaggctggcagttccagtaccagtgcaccgtccttatatactgcgtagccaagagcattcgaaactgatgaccaggtgagtgtgacggagctatagtccgaagaggagatggcgacatcacttggaagaccagcaacgtgggagctagtagctttagctgggttaccaatgagaggcgtgccacctggtacggcgccgatgagtgcttgcatataagcctcgctgggtagattgtcgtaagggttgggttggtcatcatcggtaatttccagtaagcctgcatggcggctcgaggcaagagcagcaacagtcgcaacctgatcctgtggaactttgtagatgatgtgccatagctttcggggatcctttggcgtccaatcattaggcacatacgagcttatataagtctcgtagctgctctcgaacgtcaacagcgtatccatagtgttttcaaaacattgagctattggagagcccgggttgagtactgtgaatgcgccggggtatttgttcttcgtatatttgttgatgtatgcgtacagatcggcgtagatattgttgggaccgcattctggccagccttcatcaaaaaagataccgccgagactggtcccatagagctcgaaccacttgtcgacatcttgttcgatttgcgaagcccagtctgcgaggtctttcgagcctagtcgagtggtaaattgttgttgactcacgccaagatagccagtccgaacataaccaaggatctttttgccttgactcgcagcttgatcaatcaccgatttccaggcttcatcgaccacataatctggaccgttcaaaacattggcaaccaatatgctgagtttctgagtgtcgtatgcgaagattcgttcccacgaagccgggtctcctagggggttgatatacgacgccaccgcgatttgttctaaacgcacgtacaccgtattagttttgttttatttgaagtagcaagccaattgtacgtacggcggtttggagcattcgagtcgtttgatccactcgagccggagtaagaacatgagttgtaggagaacttctccggtatttccggaagcccattgtcctgctcgttcttattggccatttcataaatgaccagtgaggcaatgatctgatgaagtaagggctggggatggaacacccggccatacctatttatcaatcatttgtcagtgaaatattctagcccctttcgccaagctggatcaatttcttacccgtccggtaggaggtttgggatctctcttttttcagaatctgtggcacttggtgccaccttggagacggcaagagacttgattgaagcaacagtttcgtcggagatcatagattgatctgacaacttggcgttgggatctaaccaaagtgtaatctgcgcgagctcgttgacagaaccctcaaaggttccatcctcaacttcatccacgcttcgtttccagggattagagcccccgaggtcaaaagtattgagctcgtagaacatgagaccggttcttttctagtcgtcaatggtatactatacaagtggtaggcaagaactcaccttgtggtgctttcaaccgttgattcgtcgacgccatcttcacaaaagcggccattgaaatggcccacgtaggaatcgtagttgacaaacttgacttgggaacctgctctctctactgcagccgcctgtagaacaactgaagttagtcaaacctagaccagaaaaaggtaggggcatcaagaccaacaatctgtgcgttgacatcatcgacaagttcattcatgacttttcgatgatcggtggtgagtttccccgaatcctggctgacgattagtgccatgccaaacgtggatttatgatgctactcacccgagtccaaattgaccagctaacatcatcacacgcggatgttagatcttcggcgaagaatttggcgtaactttaatactgtcagcaatgcaaaacgaagcaaatgtcatgacacttacccagtgtagtagatcatcccactatcttcagttagccttgaaacctgaaatatggagcatttttactgactctgaagctagcttcaactttgccgccgtgatgacagtgtccaagctcttgccgaaggcatcgtcggcaatcatttcttgtgtacgggccaattgcccagcgcagcccagagccaaattttcccagttgaaggaatccttccaaaaaaaggtcgtctcattggcggccagacgtgccacatccacttcgtctggggtaaatgaagcccatcggaagatacaatggttcaggatattcgagagctcaacatcattgccacctaggtcatcactcctgttagtacagttcatgaggtagacttgggtgatatatttaccggctgatagcaatataacctgttggtccgcgttgagtgccggaatttgcttttcgaggacatcggatgtgactgccccagagcatgactcaaattgaaaagtgcgtgctgcttgatctcccagccgttcatcggtatggatgagataaggatacgcattatcataacgactgcatgcccagtcttttcaccgggaaagaatatctgtcagtaaatgtccttcaatcctaagccagggagagatcaataccaccgtaagatccaagccggccaccagcgccaattccagccgagtaggaatcgccgatggcggccatttttgtgatgaaggaaaggtctgccgggtcgaattcatcagtagtatctctcccaaacaaatgttcagtgttcaggcttgcattccctagtacttcccggtacccaagagggtttgcgagagtataacttcctagggtagcaatagccaccaggctatgccatgatggtttgagcatgtcgaacttagaaggccagaagccgatgagaaatggagagaagatgatgaaaatgggcagaaagacaatgagaaataggaaaaggaaacaggatattgcgaagactcaaagccactagaagcttcaagcgctgtaagagacttcttatacccatgctttttagtgtggtatcatacgccctcacggcttcgccacccaatctcaaagttattactagttctgtcctcactatcactatggcatcccaaatcggcacgcaaaccgcggcaaatatggttcaaatacttggcgcataaggcacgcggataggcccggataggcccgtttagtggatactcgcgtaaaagccgatatacataactaccaagcttcctaccctttttgttttctctctttcattattcgtgtacttcgtaatagtctatcatgttggtcttatccttctccttccatctttgatctttgatcttttcttgaacttgactctcacaggtatcaacatgtgccaggttagcccctgacggcgccataacgcgctagtgctagttagattagcattaaatgcctccgtcgctactccgtactgtatccacaaccttagcgctcagacttttccctagcgctccaactttgactttttcctggaagaagcggccccaatgtcgatacgcatgaagcaataagtccgtctcaagctcataaaagcattcttggcgcgggtttccgacatggtgccaatctccgaacgatcacaagtagtatcaatactggaccctgtagctccatcagctgatcgatgtgcttcctctatacggaactattcgttagtttgtccatattagcattttaaggcgtgatccatcggcttgtcgacattactttggatattggagctcttgctacaaatggtaatactctatcttgccgctggaacccttccggcaatcttccggcaatgcaacactcggaccctttcagtgggccaagaaagaacctccctcgccttcatttcaggactagcctcgcatgttagctcgaatccaggctgtgtttatcgaagaaaaattcatatggaccacagcacagaaaatgagatgtaaccatccgagacattctcatcggagtacagtctagtatagagtcgtatagcagtaatactagtgctattccgccactagtgtatagtgggactggtccttcaaacagaacaagagactagcaggcacagcacagtccaaagcggcgatgcttcgaagacttgctggacctcataatagtcagtcgcacactttattggaatcaataattccacctttcactcttggtagcttggatactagctattttaacttgataaggaatgtactatgtggcctaagtacggagtacagaaatgcaaatgtagcgttccgagacatttggctttggccctagcgtctagcatatacgccgcttcgtataataacatatagttattcgcgcaatttaaatcttgtcctagattgagaggtccgagtcttggctgatctaaaaggaagatattcggattttctaagcgacaaattgaagccattattttcactagttagactcatttgtaattgaaattagacctattgtacatcggccagacaaccctttataaggatagactagcctctgccgctcagagatatgtttctgggaacaacaggtacttcttggagtttcatcgttcactgtgcatgagtatatgaaaagcctagctttcaagtcaagaaatcatactccgagccgttgtccatttccattgtcgcggtgtaattaacgccttccttcaaccggagcttgacatggtggctaatgtatttgaaatttctagatccccgtcggtcacactcaaattgagtgcccgcttcaacgatgctcttcccactcgtccgaaagatcggtcttttggcctttggggccttggtcgtggtcaaccctgcacttggagcaaaacagcccaagctaggtagttacgacctgacggaagccaaaatgccgcttggcccgctcaaagttaccctagactatagcctcgcaacaacttggccgacgccgctggatctcaatgggccaaaggtcaagcgcaattggcaatttagcacccacatggtgttcgcgaattccgttgatgaaatatcggacgggcagctctggcaaatagcacgagatgcggttgatgagatgattgctgaccgaagccaatatctcatcgggcccatggcacaacctaacgccatgggaattctggcctggggcaatgagatcatacttgcgtcttctatgaagggagcaggttctttctcctatgactttcttggaggtgacaacccggtcggcagaagactagagatgtgccagatgctctgggggggagactggtcgactacccataagaacaatggtaattgcgcagaggaattcgcggccttcttataccacagacaaaacgaagttgaactgaaaggacaaaacccgagagttggcacctgggtcgcgggaaaagcttggaaacagatagatccatgtggaactggtgatgcggtaagtaattagtgttcttaggagcttatgcttcatgaagattaactgacaaatgtataggacatttgggggtgcaatcttttcgtccagggtgagggaatgagggtaatggatactgaaacagcaccggaaccttacacgttggccagccttgctggaggcccgacccgtcaggagcaaattcagtcatgcgggggtgatcctagagtattctttccgtagaaaaagattatagtgaatgggggtaggctcgaagggatattgttgacagaaggacttgtattagttatatatggggggcctgcctgatcttttcaggattccactgaccgccttatataccactttcgtgttacccaataatcgaaaagtaactatgatgtgatgtgcaatttggaaggtcaagaagtctcaaagtccacaatctaataagttgcaggcttttaaatacaaaaggggaatctcgcttctgtgttggggatcccaataatattgggaacgcacaacaacaaagtgagcagagattctatccaggacaagggaaaggaccggggtcaaacgctcaactgcctgatggcgtcaatcgccaagacgtttggaaagccaagcctggatttcaacacagacctgagtgcctgactggttctgcttcagttattcgaacctgaattcccgactggtgacctatgtcttcgagaccctgtaacaacgcaaggtcccatatccccaattctttcgctaacagacgaaacccttggagacgaggagtgaacgtctcccattcttgtagccatggtcgaatagcttctaacaagtatgtacattcccattcccattcccattcttcttggagacatagtctgtccgtgacagtcagccattgaaggcttcttggaaggcattcctctaggcgagccacattaggcgtagactgagaaaatccaagcagaaaggcaattggaacttctagactttgcagcatatggagttcgctaaaagttttgaacgaccccctaaaccgaacctccgggtattcgggggctgattctgagagggatgtccctgccgtaatagtcaaatctgttaaagaattttgaacgtgggatagacccgcggctaattgatccaaatcaatgatatcggtgacatattcatcttgaagatctcgccgaaagtaccaatcccatttcaattttcgaaggtttggggtgattgatagtacttgggcgagaggcccctcacgtagcattgtcaaatcgagcgatacgagtttggatgcgtttggtagggttttcccgggccatttgaaagttggcgggttatcaaccaagacccttatccgttcaacagacggtaggtagaagagagggaggacatctgcagtatttctagcgtctgtatacttgcgtatgaagaagccaacgccgggaaatatagcctcgacatcttggagatatgaaaaggaattgagatgactatttttctcacagagggccgaacgaagcatcatacccataaggcgactctctcgggtgaagttttggctgagctggagagatttcagacatcggagctgtgataataagagtgacatgaacgcgtccactgttccggcgcgtaactcttggatccattcactggcaaatgaaacggagagattttcgatacagttcacgagcccatccaaaggaacttcaccaagtggaagtttcggactacttatcttgtagtcatagaagtattcatcgaagctatccccactaaggattagaacatgaatagaacttgcgagctcgggccttcgcacgatattatgcaaaaactgagcgatcggaggggtttgagattttgtccatgtcaattcgacgcgattgtagagaaatgactcagcaaccgcgcgcaagtccctatgcgtaagagatagtgcgtagagatcgctgcgcgataaagttgcaaatacgaggcgcaacagctctgtagggatggtgagaatagaggccgccatttgatgatttccgactgctatttcaaagagcccaagagtgatatctcgttgcctgttacaagtagggtgtagccctaagtactctagacccaatcaggaaacgacgacatacttctgtatgatcagctattcccccataaaagcggcggcagctaaaataggaaagccccaccctacgaagacccatagcgctcagggttcaaaactcctttcccacccggcagatagagtcacctatatcttatacttggggatattatgtccattgatctaagttgttaacactgattctcttatatgcacatgagaacgaatcaatcttatcgcaaaaaaaccacaaaatgccaagttcacgcataggatgcccagcctatttaaaattagtaaagcgtgatggtgaaattggcgcaaaggaaagagtatacataccgcaatacaacacagcaaggttcttctcatcacttgcctgctgaaccaattcattgacagtagccgtgacactgagggttttgctcagttttttcgccaccactgtcaacgcacggtcagcttcactaggttcattctcgttcccactctttgagacgagaccatcagctgccccaggcagagctgcaggcccatcactggcttgtttgtcctgcatttgcattttcttcacccgaaatggggagacagtccagctatacaacgggtcataccgtaatacatcgaggatcgtcattatgctgtacgattcttgccgaagtgcttcaagggtaaattcacaacaacgccggaaaacgccctcagtcttggtgataccgaatccatcgactacgtcgcgcgtcaaccggaacggtacaacttcaggaacaggaagcacacgtccttgttcgaacgctacaccgagatcaatgtgcaccacttccccggtcttctcatctagcagaatattatgtccgtgacgatcgccgagtccgagaacatgaccgaggatagagattgcagcggtgcttcgtgtgtaggctaaccgcttgctaaaccagtcgtctgggttgttgaacttctccatgaagaaatacttcaagactgggtggaagtgctcagtcacctgtcggtaggttctgatgcgttgctcaaaagatttagtctgtacatcggcaatgtgtttccggcaagagttgggtttcatgtccttcgggaagtatttctgatgtgctggcattaggtagtcgtgcagaggaatcgtgttcggaacgaactcaatgattcctgcgcttggtgtcaatggaagaaccttgtatgttcggatgcctaggctccgctggcgtgtaggttgatggtctttcaaaagactgctgacttgctcaaatacttgctccatgatggcatcttgccgcaggtcatcatttcctcccttgaactattgctttgttagtttaagaacgtcgacggacttcaaaaaaatagaaagcttactaattgcttgtagcacttgccgtcggatgcagaggcggacagaatttttggcgcgctaacgccggaagcaatcgtgaactctgagtagaaccttgtgattgtaggaacgtgactataatcgcaatctgcacggaggctgattttcattgtcggtggtggcagtttgtaagtgaccgcatcttgtccaaggcgttggccagtagtcaagcttcccagtgggaccttagcaccacttttgtatttgccgtctagtttatcgattgcaaatcgcacatagctgatgttcacattatgcacagcaatccaagtctgaccaatgtgactatcgttctttagacgatccacaagctgatttgcggcacggaaacgcgagtgagacgactgatctttccctcccttggacttgctgctagcgaaaatttggtacatgccatggaaaggatgctcaacacatatcctgtataccaattgagtgagtaatgtctggaaatcatcggagacatcgagtaggcgagatgatagctggttcatcaatggtgcaaattttcggctaggaactccgtccagataccgagagacagctgaatttgcagtctcattatctgatttatcaagccagagtgcacagaaacgtagagcatcattgttgtaagtatcgctttccctcaaactgagaaggtaattttcgaggcactgctgtaggaaagcctcccgacttcgcaacaaacgttgatattcgcggtcgtcaaggtcgaaccattgctttgccttggcccgataattcttcaagtattctctctccttgcctgtggcattcttcatcatgtcttccaggccaaggacttctttctccttgcggtcacgcagttgttccactctcttgaaatcttcgaatccatcagggtttagtagctgctgatcacaaaatgttgcaaagccgtgatagacacgtccagcttcttctccgtcggagtttcctttcaattccttgaccgcgggatataggtactcttgtagaattgagtcaggcttttccaagcgtgcctcggcaacgtggtgaccctaaacatgatattagcacttcggatagaaaggactttttggaaagactccctttaggagtctttcaaggactcttctaagaccaacttaccaaagtcactagaagttcagcccgactgagggggattgactgtttatgaaggtcattctggcccttcagttgctggagcatgcgaatggacgcggtcatctctccttgatcccacagaacgttggcaagatcgaattttgcagctccgtcaatgttcattcctaacgctgcgcacggttcggcaagcttcgaaaggctcattgcagatttgagcgatgcctgggagataccatgagttcttgtgatttccaaggattgtcgaatgactttcgcttctagaagtcgcgaatttccgagactcagatttgcccgtgatttgaggatgtcatttttcctgactgaggagaacaacgcctcatgccaagacaagatttctccaacttcatgatagctgctctagtcagtacatatcttgtaaatggttttgccaagggaaacacgcacctctcggttttcaaccagttgcttctcgccatgatattttgccactcttcctccacattctcggaaaacgcggagtgcaaagtgtcgctgatttcagttataattcccaacgcgcgcattgagcttcgcaactgaatagcagacccactggtcttgagaagagaacccagtgttgtcaacagaccactttcaattgagccattgacctcgagcagagaacccgaggtattgagactttggaatgtacggaatacagtcgcagatggggaagaatccgaaggcgatactggaatatcccatttttgaagattagttgcagcttgcaacatgctgtcaaaggcaacaggggcgtcgtttgcactgccggacgcagagagcatcgtattggcaatgccctggaggttggtagcatttaaagccttcaacacgccatatgattctgcattgtcagacatctgaatttcactgtcatattttgcactctggaataagagatttttgaacccggagctttcgtactctagccgttccatgacactgctcaaagatgagctctgctgaatgccatagaacaagtccggatcatcgatgtttttgaaaacatcatgcagaaaagcaggcggtggctcgtatctaacgacagatgagcgacgagatgtggaaacaacctgggatgtttgtatttccaggaaaagaagcgaagtcttatgcaaaccgcagcgatgtgcagctaaagatgcctctctgaagtcaatatcaagccatttgtcccgctggactatagttgattcatctggcacgggttggtttcgaaggtagagaatgcagtcgatcacaagctgagcgtgaggtaatgtttcctcgccaatctcacagagtacccgccgaaaagtagcagatatgtcttctcggaccttcccatttttgtctttatcatccttctctgactgcaaaacatcgtgaaccacgtatggcaacaactgcgctgctaagccaggagtcacgttgagaatttcgcgaagagagccaatgactgggtcttctggagcagcattagataagaacagggaaacattgcgagcccagtcagcaaccgacagcccggagacgctggttgctgcattttcacatctctcctgctccgagtttgaaagcaaaatggtgggacatgtgtatgggtcccagacgagggcaccaagcagagatatgggaatcaccctgctacaaccttcgtaatctggataatcatcgaccttgcttacgatcagccgcaaagtacgctcaatcaggccagcttcaaaatgcttttgcacgtccagcatttcgcaaagtaccatgagaattcgggccttagaatgacagaaaatatccttaggcaatggataagactcgttccattcaaatagtgagagatcctgttctcgcaggagcaattgatcgattttcccagtggcagcaaaggatcttccaatgacctgagcggcccaaagtcgatattgagggcctccattggagttttgaagtgtgtgccataaagatacaacatgggaagcgggatccacgccttcatttgacacccaattcccagtgtcggatgcctgctcgaattggggacataggagcgacagaataagatctgccagaggcttgctcaacagcgcagcccctttagagtcgaggtctttgagaattgcaaagaccaagtccttcccaacctgtccgaccgaagagtcctcacaagttgagaatttctcagcttgtgaaacaagccgatcaaatgatatttttggcacttcatggaaaagatgatcggaacggacctccttaataaactcaaccagccattggtggaatctttttgcatttgactgcactgttctgtactgactctcctgagtcgtgttctcaggtaacgacgaaaatattccgcggagagtaaccattgtcgagacagcgatacctgcagagaaatcgggtgcagataagaggtatcctttccctgcctcgagtagataccagaaaaccccaagagcatcctcagaacaatgaatgtcgctaaggaaaggccgcaaggagctgagtgtcatctctagaggataatcttgaagtatgacgggaccagccacacagattaagattcttattttgcggatcacagaacaagcatgaagcgaaccgagggcgggatgtatggattcaagcagcgagcggcagacaaaagacgcaagtgatggcgtccatattgattcaaattcaaatccagtgcgtctgcaaagaaattcaatttcatccaggagataccgtgtccgaaaggagggttgttgatttgctgggagtgcattttgagatgcactcttgttgattatttgtgtctgaatgtcgagcgcataaccgaagttttcacgctttgagaatgctcgttcgatctggtcatagtagtcgagagagttgaaaaaagtcgcaatgattagggggaattgactctcaatttgtgtcatgaactggtctgccccgagaagttttcgcagacggatttcaacccccttgggctggctaccttgccccggaggagtactgatatctcgtgcaatgctgtatgcctcagctttgtagaaagaggtcaccaagagctcgagatgtggaatctggaggtattttgcaagctcaattgtttcctgttccttggcacgcatcatcatttgcccaacgatttcatctttgacgtccatcaacatatcctgaaggctgtcataccgaaatatagtaaatggcatagacatgatactctgtgtctctgtccatgtgtagagtatttgcgacgagaaaagccgaaaaagttgtttcgcgtcttgcagaccgagggtctgcgaaacggagaccatacatctctcggcataccacagtgacattggaacttgagctggggtttcaaatagatggtagatacttctccgcagcaaagtatgccatctagaagccaaccgagaaagcacaaaaaggcggactgcaattccttcgatccattcagggtctcgtggcaagctctccaatacatcatcaaagatggcatcgtggtctttgagaaggaaccgctcaaataaagcagggataaatttcgcaacgctgaatttgacttgaacatcaccttctcgaaggattgtgaataaacttgttcgtggcgacggaagagactgctcattgccatatgaggggcatgtaccaatcaccccctggatgagctcggctaaggcgatgtagacctttggtgtagctcttttccgggccagaagcacttccataaaccaattgtacaagtccatagccgattctttcaaggtatcgtcaaggcctttcgtccaggagccgacaaagctggtcatcatgcggatgcaaacgcaatgtgaagcctcacaccgctccatttcataagactgtagacaattttcacctaaattttccaggatgcagagcagttttgagggctccgattccgagcagagtttgaagatttcaggtaagatagcttgggccgccaagatatcggcttcatctaagcctgccaggtattcaacgacagaggacgagtcaaaatctgcttgggttctaaggaataccgagagttggatggttagacagcgttggtatgtgacggggtcaaggaagatagacagagaatttcggttcaaggtaagaatagtgtcatcaatggctattgggggttcggccatgaatcggtcatccacatccataaaatcttcggctgcagatggactttttgagttctggcggaaatactcgagcgtttttgcaagtggagtgacaagttctttaagactagtctggatggcagcgggggtgtcagaactcgttaaaggatcgaggagcggtgacaacaagtctaagcaagattgcatgaaagcggattcgtgtgtatgagctgccagaaaatcgcatatagcgttccacagactccgacagttctggtgcagatcttgtgatcgaggttgagattgcaatgatggaggaagacatgccatgaagagggaaaccacaacacaaaaggacgccagaatctggaagttatccggagtgatatgtgatttttcttcattcatagcgtgccacgtttgtaaaaacgagtcagatctcactcgaaacagatctaagatcgctatatcatcagggtcttgcctagagaattgctccaaggaccatgtttcctgcagactccaggggtttgctggagcaaaattcgtatcaaaaatgtaccccaacaatttgcggttctcgtggaaaaagagccaagtgcgagctatatgccccgttggtcctgtgacttgataacgaggaatggcgaaggatcgattagtgcacgacagaaaaaggtccagtaagtccaaaggacgagcatacgcagcaactcgagctgtctggattcgatcagttaccgaacctgcaaagtgactgtcagccagaaaccgcgaaaggaaaattttagggcctcgtaccggcccaaacttctcttagccagctacatatctgtatcgaggcctgctgggccgacctgggatcaagctgtgtcctcattcgtgcaattgaggcccatagccttaaagacgtgtctgagatagcagatggtccattgacagatgtcaaaagtgaccgcgttgtctccatagctactgagtaatccaataagtctgactgcaaaatcatactcactaggttacacgcagctcgagatgtcaccggagatgagaatgcacgcgtagtaaattcgactactcgtggccagtggaccctaattctaggtgatttggcagtagccccgttcgcaatactattgtcatagtcaatttagggcctttcttcctatcctttctagatgcatttccgaatttacgtaccttgtcagagcaaccattgtccaggatgatacagcaccattaccgccagagatgttcaggacaagctgcttgaagaagggctccttcgtctcgatgtcaacctcagattcgaggaatgggatgagttgcaatgcacatattctttttgtgcctgtggctgagaccgaatctcgaaatacgtcctggatctcagaactgaagcgctgccttttgcttgaggcttcgcgtgctgacccagacttgactcgggtgtgaatacactccgagagctttaatagctctgcaatcaaccagaggactgtccagttatgctctgatctagcagttccgaagcaaggtccatatactggtctggtccggcatgcttcattgtgataaagtgtcgtttcatcaatttgcatgatctccttttctgcccgtctcacgtattcggaatggagtgtactggctaatccctcgatatcatgtgccagagattccgacgggtcttttcgagcagtgtccacgaagacgatcattgacagcatcaaagtggcaagtaactcttctttgagaatctgtaccttagtggcccataggcgtcgaattactggaaccaggcctgacaggaccaaacggacaagttcggattgatcaaacatgacttttgtaacgactgcatttatgctattgaacgcgagctggtgtgtattcccagccacagatgactcaacaaactccgaaagtccgtgaagtatgctttgagccgtagtgtgaagaggagggtttgtgcttgttgtcaacagttgaatacagatcacaacttcttcaatgacatttctattgccactgtgcctttccctgctgactgagacgggcgcgacggtcattcttgagggggtagaacggctgtcactggcatcttggtcttcgggaacgaaacgataaccgcttcgaatactcaattgactctcttcattctcccggggactaatactggcaaggcaaaagctcatgagggctttccagtcttctccgtcaagatgctcggcatgagggcggtaacgtagaagggatgctaaacatttggtatagtctaggcttaggggttcccacagaccttccccagggaccggtagagtctcagtaatgtggtccacaatagcgcggacggttctgattcgcaaatttttcaaaaagaggccaacagccattcggagtacggaagcacatgtcgagagccgcgacgcagaaggagtttttgtgggcttttgggctcgattgtatattgacctctctgctgcgacaaaacggaatagcgattcaaagatcttgtggcaagctttgtcattgagtgtttgtctaggtgtggaagattggttagttactttaatagcctgaagtgttcatttggggtagttgactacttacagcttggagctcttcttgttctgctgtaatatgtgcttcaagtctgtcaattgagttagcgccagttatttctgagatgagataagatataaagcaacctgccaaaccatccgagcgggccttctgtttgtctgatgagagcaggctaatcgttttgtcgagaaagatctcccccatcgcgtcttttttcggggtcttttctcgacataaaacacatcaaagccttgagtctcaacaaatcttctcgcacctgacaagaaaagacatatcagatcaatcagccagtctgcgagctaatgatcgagtcgataagcgaagtgattgtgtttagtggaaagtggagtggcagtatttgcgaaagctgtctaccgcccgatttttgtcgcgttccgcctttctagactctggaacaaacatagagctcgagcttcacttctcaacttcaccccgccgtcatggcagagctccaagatacccggaatggcctccgtggtctgtatcaggatctctcggctctttcgaactctcaactccccaacgtcgatcgcttgtgtttcgaattggagacccatattcaagacttccgcaaactcctagacaagccagcaaagaacaatgccagccgccaagctgttctctcaggtaagtagccacttggtatcttggctacctcgcaaccctttattcgtctgttttgacaagttactaacgtcgaacgcgatatcctagggaagatcactgttgccgacgtcgaatactcggtgaaccaggatttccaacaaggcgcactgcaacttgcagatgcgctcaacatcgatgaactcgaggcagcagttatgtttctgaccgctcaggaaaattcacaagtgttggacaggcccccgttgatcgctgcgataataagcttccacgagcgtcgcctttttaccctcgagtgtctacgtctcatcttccgagaatcgcgcgaaattgaacatgaagcgacccatcctatcatgcacgaaacactggcccacgttctggaaattaaaaacagccctttgcggaatgcctccctctttgcgcggaaagccttgagttctatggccgacatccagaaatggctgtcgcttcttggagatcaagttcaaaaggcctcagtcgttggccaggaaaatgaccgcgatatcatggaagccattgaattccaacgcacaagtctgcaacagcagcatgagtcactcggagcgatcctattctatatgttcaaagggacatacacaagctgcgaagacttccgcatacttgtgagtcagttaaaaaaaattgatcgcttcgacggactcttgtttcactacattccagtcacaattgtgtcttttgtacagcacggttctcccgagggctctggatctgagaaagaggcacgagacctgcataaattaatcactacatccaaggatggccaaggctggaagctatcaaatttccacgctgcccttgttgctctgtggctgtcagtctacagtggatggtactttgatggtcttccatctccatcagtcgacgcagagaaagaatccgaagagcgtacgaagctgttcatgtcttctctcgacgatggcgcccttgattttatgctcgcaatctgctccagtgtcaacaccgaggaatgggcggaccccgcgcggagcgaattagtgacattactgctcagggaaagtgtggtatcattgcctgatcccgaaccatgctctagctttatgaaggagcttttaatggaaaaccttgaggttttcgtggaatcatgcgttgcaaatatgcccgacgcggtgcgacgactgaagtcggaggaggactcacaacgactagaccagatcaccgcactcagagatggcctcacctctaacctccaccgtggcttggtagaggtgcggactcaccttgaatcccttcttatgatcatttcatttgcatttgagcaccgacaagaagccgcccaagagttttgggctgatcctgatgggaatctctatggcttccttcagtgggcgtctaaacgacagactgttcctcgggtcagtgctttttgcgaaatgctgtgttcgatatccgaaggagaagaaaatgcagctgcggcacatcgatttctgtcggaggaagataagtttatgtcttccaagttcaagcgatctacaaccatgaactggtcgcaaatgttcgctgaactgaagctttacgcgtctcgggtcactgagaagccttccactactacaagcccccaaggggcgccagggatctttcgtccacggaaaccagagcccgtggaaatgaacgagcctgaaagcccagtgatgctgacatgttaccttcggctgataggccacttgtgtaagcagagtcgacttatccgagagtggatgctgcaaaacgaatccttcaatgtagttagcacactgctagacctgtgcagtgggccgattccatcgcatcttcgagcaactacctttttaactctctcagcattgatgactgacaaatgctcccccgttggaaaggaaacgtgggcccgtatcgatgggtggctatcgggaggaacaggtgcgtccggaattggcaaagttcctttggtttccaaccctgccgtttggcaccagcaacaagccttgcaaaagatcggggagagctttgaccagacaaatgcatttgttgttcttatcaatgcacttactgctccttcgtccgactcaattgacgacccaatgtcgttgcctttcccggagaccctaggtggaacttatcgcatgtccgggattgagccttacatcgatttcatcttggggcatgccttttcgcggaagattcaagagcttaatgagtatcagtcccgcctgttgaacttcaactgtctagacttcgttgtggcaagcttaaaatccttcaatgaagacctagtgttacttctgagtcagccatccatgtccgattccccgacgcagacttcatcgctgctcacctacgttcgtttgcacccgtttgcacgcgtggtagactggctttttaacgaagatgtactcaaatctttgtttgcaacgtctaaacaagacgtttcggacgttgctaccgcgtcgcccgactctgttctggttctaactttgcaccggagtctggaggttatgaacttactcgtggacctgcaatcgacatactttaacattgtcaaacctctggtgcattcccagcccgtaccttcccggaccatcgtggcaaactcctcgctagcttcatttgaggacaccgtgctgaacaatctgacactcatcccgtcactctgtctctattgcggcacagcgcatgaacaactcaccgtcatttccatggctttgctggaaaagcttactagttccagaaagctcaacaagatgacttcgccagaactcgtcaagtggcaatcttcgaacaagattgtagaggtgcttgcatccgaggtcgatgtggacagcatatcgctgcctcttgtgttacaaatggaaccagatattagagagcttgatttcggcccgaatgctgctggctatgtcattcgggaaagccttcttgctctgttgaacacctgcctgggaacgatcacagaccgcccaacggtagcccatctgctgctgggcttcgactgcgtgggcaacatcctcgatgtgtcatcggaagggctattcgcgaatcaaagttccttgctgcatgccattgtgaatttcctgaaggcttatccggagatcctcgatggtggcattatatcttgggtagtgcacctcaaacgtatggcttttgaagtgctgaagcatctatggtcatcgaagctggcaagttactacacccttggtgaaatgcgtgctcaggcattcctgcgtgagatgtttgcctaccaaccgatcattggcccgagcactgcctggaatggattccccattgattcagatgaattttggctcacagacgctgccactgccttagcagaattcctgctttaccggagtcatctcttcacatatgccgcaaccgaggttcgctcgacagcaaaggctagatcaccagctctacatgcccaaattctttcagtgttgcttggaaatacgcttgcggataacggtgaaccgttatctagtccttccgtgttcgatcttttcgatttcgcagaccttgatgttgggcgcgagttcaacatgccccagctttacttgctcggtgatgttgctctccaattagaaagcaagcgggaggagggcgtgtacagtatggaaggggtagaggagatgatacaaatgcggaaagcagaactcacggccaatggaccgctccgcccacatgatgaggagcagttgctagctgaggctaatgacctgaagttgttcatccttgcaacgaagcaaaacagcctgattcaaatcaatcgctatcacgccctccgttcatgggtagagctcgttgctacgatgatcacttgctcttctatcgacgaaggaagcaggccggctttcattctacattcaatccaattgattctacctaagctcacaacggcaatcgaggcggatcttcccgaagcacttgaactggcacgactggctgaattgttgatcggtagacttgcgtccgagccatctgcaacagatgcgtctcgaagcggggatgtcatcgacgaaaagctccaccagctctttcaactctgcatccggggtaccaacctggcgacaggaaatgtgttgttgagagaaacgctttacagtatttgttcccactacataacacgcatcacatcgtcggacaagggccatgaaaacctacgacgtcttagccaacatgtcatcaaagcagccggttctagcctgattgagactatgtgcgatgacgcatatactggtcaagagtcgtgccgtgcatccgctcttgtgctattgaacagtttagctgttctggatcgccaaactgactgtgttttggctgagttcatctcgaggtcgaactatttgagtctattcctggatgccttgcgttctcttcccctcgaacttcacaatgctcagggaagcggtcagtcatacccccttcgaaacagtcatattattacaactaatcaaaactcaagacaccccggcactactggcatactatgagtcgcttttatcattacttcagcggctgtctcaaactaagggtggagcaaattgtgtgctcaactctggtcttttccaagccgtgcacgaatcacgacttttcgctgccgatccagacatcggcattggttagtcaatcatatcctggcccaattgtaccttgctaaccccctcagacattgaaaatcccgacgccctccagaggtattacgatcttctcctttcagtccttcaggtcatcgtgtatgcggttttctctcgaggtatccacaacgaacaaattaaagagcagacccgcatttttttggctgaaaatcggccatgcatggtgggtatcttcaaacgatctgccaagatcggaaatacatcaaccgcccaccacgagactctatgtgaattagttaagactttcatggctcttgttactgccacagatttcatagaggtatgttttctcttcttttcattttttgcaatctattgggtcgaatccgggatcatgtgactgactgagtgtagttcgaggaccaggaagtccaacatatcgcccgaccagcgttgttctcatgagcctttgtccactgatgctcactagggaattgagaagaaatgcatgtatcattatgacccggtggagtgcaggcggttcccaggttgagcgattttaccttgaattcatttgcatcacatctaattcgtcatgtgtaagacgtccgcccatttcgatatctcggccttatgatggctatctttcgtaggaatgagtgctatgttcgctcttgcaaagtaacaaagtcagcactcgagttctgggtcgagcggctatgtttcccagacggagaagctatccgtgggggcgtacctagaaaatccacacccagaatctcgcaatgaagctttgggcgcatctccaaaggtcatgacgatagttctttgggaccattggtctctataagattcatgaaacaatccgatatttgagggggcctgtctcggttactgatctaaggggacaattccatagagtatattcgagtcttactgtatatgatcgacgagattagaaatcggagaaaataatatcataatatccatataagtataacaaccacgcaactgcaactttgatacatttgtagggtgcattcgccagtcttttctagtgtcttctgtgctatcttgttggatgtcttttttgattggggttttttccatctcttagctatcatagagagtgtgacagacacaaaacagccgtagacgagtatacttttccattgaaaggaggatggttcagtcccatgtataacctagccctaactctcgccaatttgatagacccgagttaggtgtacacgtgtatgatcctgaggtacaaattgatctggcatatacatgtgatgtggtattgcactagtagtatgtagtcgtgatatcatggatgctcctgccttggtgaggttggtgagtttctagattgcttgcccagctggtttccatagccaccatccacgatcgtaccttcctgtaaaacttcagcttctgtttaccaacctcatcgtaccttcctgttgctattgtctgttgctagggaatcccccaaatgttatatatttgctccctccactgtttttcttttctctttctcctctccccatgccactggctatttttcatttgcacttgctcttgattaccaaaaccatttcttattgctttcaaagctattcaaaatgcacccctctacctttggtaaacgggttccctcttctcgcatcctgctttctaaaaaccgccctcctcctctgaagtcatgccttgccgcagcggactctgatcgggactcccccccctctggagagccttgcgtccggaagacagtacacttccccgacgacaagtgcttcctcgaacgggtcagggaaatcccgtgtcgaccaaatcggaacaagaaggaactcttcaaaagtggccggctcgcggagacgaagtcattcatcatgtacacttcgaatcctctgggctccaaccagaggttcctctccaagcatcctggaggtagtgggcctcagtacgccacgcagtccccatgggtcagcgttgtacgtgcccgttacctcgctgcgaggtattcgtctgccccacgtgctccgcagtccacaccttcctccgatggagatgtttcagcgcacgagtcttcctttgatatgtcttcactggaggatgccctgcttgagcctacccccagtagctcactgcatgagtcttccttcgacatgtcctccgtgagtcatgcgctgcctgatcctgacgtgactttcgacatgtcctctttggccgatagcctgcctgacaagagtgccttcaatatggcttcgctgatggatgccctgcctaaggttcccccccccggttcaccagatggggttacctctgacatgtcctccctgatgcgtgcactccccgactttgatgctccctctgttgcatcgtcccttgcacgtgcccccaagtccatggctgcgacccactctcgcgagtctcgcaagctagctccaaaggttcatgcgcgtgtggttcagacccgcgtcgtccaggttggcccgttctctgccacctgtttcatcaacctttgtgggctcatggttttgttgggctcgttcttcccatgccttgccccagcattttatgctgcgcttgtgctcctctttatctatgggacgtgcttcttttgatgctgacggtctgcactcatgtcctcagagcgctcggcgggcttggcttcctcttccttcctcttccttctcctttttgttattgttgctttctgggtctgctttcttggcgttttgtttttttctgttgaggcttttgccgtttgattttgcgaaaataaaaaacccccaaaaagattgctttctgtgtctgttcgttggcgttgttggcgttggtgtttttgaattccttttcttgttttgaggtaaggacttggagacatgggggcgacgtctctgtctgtgatcgcgaggaaggcagcagagcgtgtggtggcttcatcttttgtctttcaaggtaaatgatcccactcctcctgtcttttatattattctaacaccacgtcttccagggaggatactggcgaacgtctctgtctgtgaacgtgcggaaggcagcagagcgtgtggtggctcaattggatggcaactatggtcagcccttgtcaaacatctggtgtattcaagagctaacatcacgatcaatttcaggtggttaatgggcattgccatcgaccgaacgtctctgtctacggagagcagcagagcgtgtgctgacttgcttccccccctttaccccactactttcagaaacagcatggttgaactgcaaagtcttcctgcttcgtgtgctgacatcttatagctcggtcaaacgtctctgtctgtgaacatgcggaaggcaacaggacgtatggtggctttgtcttttttcttccaaggtgaatatgtttccacctcgtcgctcttcgttttgactacatactaaccgcatattttcctagggagggcttcggggacatctctgtctgtgaacgtgcggaaggcagcagagcgtgtggtggcttcgtcgtttttcttcaagggtaaatatgatcccactcctcctgtcttctatcttatgctaacaccacgtcttctagggtggatactggcgaacgtctctgtctgtgaacgtgcgaaaggcagcataacgtgtggtggctcgccaaaaagggcgaaaggagtatgttttatacctctgcccatggatttctgtggttgtgctaactgacttagtagtgcccgatggtgtccttctacctctttccttttttccttcttttttcaccatgtgttctcgcagtgcgaggggtatggagaagaaaaaaatgaagtagaagccgagtacatacgtatgttcaaacagtctgtgcgtgtatcaagtacaatcctagaatgtattatgcgtgatcacttggagtcacaatggacttcatgctttggcctttagggtcctttttttcgttatacagtactagtgaaccataggagtccggtattgcgcgagggctcggaatatgaagcgggggtgattcttgcgagcaggctgaaatcatttcttgtcagagacctggggggtgcgagggtatcatgaaatgcatcaattagccaatctttccagccctgctgtacagaatatcttgaaactggtatcactaccaactctaacgcatgcctgccactcctactccctcggacccagcacaaaactgaactccttcaaaaccggcgaacgcttccaccttgcaaagagctgcccattctccaccaagatctgccgtagcacctcccccctctccacctctgtagcaggccatacaccctcccataccatcacatatggctccacgaccccaaagacctcccttagccacctccatgccctcccctcctcaatcctcccagccagcaccatcccccgctctagttcctctagaaaaatatccctctctcgcctctcaaccgcagcccgcatcaccccaagaaacatatacgaccgcactacaaagtccaactcacccacctccgccttcacgcccatcgtctcctccactgcaacagcagctaaaaactttacctcctcctcactcccaacctctccctcccaccccctataccatgcgtacgaccccaccctaccatccggcaacccacaccacatcacctcactctcccacacactatccatatccggctcagcaacctccctcctcgccgcactcgcctcccacagctgcgccgagtactttgcttcccacgtatacaaatcatacgctccctgcgcgaccagtatgccgaagatattcgggccccacacttcccgggaaactgccttggctgagccagaccggctaggggaaccgagccccatgtactcaagccagaagcgcgcttacgtctccgagtagggcggcacgctagtgtagaccgtgcgcaggcgcgtgatggtcgtctcgagtgtactgagggctaatccagtgagagtcgcgagcgggagggacggctgcctgcggtgcgtgtacacgatactgtgggcccagcggggtagtttcgtggcgtgtacaggggctcgctggcgcggcagccccagcggggagtcagagtcaggtaagtcttagaggtcaggtaggcggtagaagcgcgctgtggtacgctgggtaaggaaggcagtggagtaataagagcgccatgcggaggagtggaggagggcgtggtgtatggtgtagaaagactggaaatcatcaggggaggggaagtcaccctcaagttggttggtggagcggtagatggccgctgcgagctgggcgaggtagaatatatccagggtgctgtgatttatcagtctttgtacttgtagtatagttcatatccttgaaacttaccgattaaacctcaactcgcccgcgccgaacgaccatccacgcgcgtgcagcttctcgacaacatcaaagacgccactgtcgagccacagctcctcttccatatagatgaatgctatccgcagcactttctcgtggcagtccaccggcaccacgccgccttcgacgtcaacgaggaattctttagcgctcatggcgaaccctctgataagtaactgatgatgatggtggaatataaacaagatcctcaatcggtatgccaggggtcaggatgcaagtaagagctggtgatcgatgttgttaagtctaagcatattgaagctaccatagccatgagccacggcagaaaaaaaggagtcacagccgcggggcctgtacgaaaaggaattgggatgaaaatcatgtatacccccgggacgaagaattggtcgagaagagaatgagattttttttaaaagcgtatatcggattttgttcagttataatgtattccacgtgctcatacaaatagcatgatcggtatttcggggaagcttatcacttagggctaattgtcacaaagccgattccgagacccgaaatctgccatgtcatgttgcgtttgtcttttgcgggcgacattagtctacatgcagacttataagttagctttttgctattgccgggatggaagcggatatttttatcaatatcaatattattagccgatggtcctcttcagctctcgagactcgaatgtcgaggattgacatacgggactacagctacatcagaaagaaaagaatgcaaggaatgaaagcaaagcatattagaagaatattcgagactaccactaaggcgaaaatttaatctgtaacaaactcgtgatgcaagaaagcgccatcataacaccaacccatgacaacaataagagaagacggcacgaactcgcaataccactaacaagatcaagtagatgtttatgtatgttgcaagaaggggaatagttgtaatgagacaacccgcaaagcccggccagctgagaaagaactctatacaagtcgtgacgtgtaaatgcgctgaaacagatccagagaggtgtaaagggtgtgtgtgcgtgaggttacggggggagggtatgagacgccagaaaccggaatggatacaagctccagtgcgagatatgagataatcaaacgctcaacggatcgaaggatagcaagaaagatgaagatttaggatgggtgggtggatcatggactggggggaaaagagaaatatgccatgcagaatgacaaactcagatatccgacgaatggactacggtggtgtaggggtttggccgaactctgcgtggtcgtgaggcttattgcgggatcgcatatacatggcatcggaggccgcgtcggccgccggagaatcaatcgcgcggggaagactcctgtgctgttgctgttgttgggtcacaacctctcgtgcgtagaactccaccagcattgtcccatacgactctagttcttcgacggtgatggcgagtcggaagtcattcagaaggaggaattgtagttccaagtggttgagctccaccagtggaagaccgccaacctgtatatccgatcatgattaattgtgatccacgactcagatataagaatcaaatacctttgcatatcgcgaattggtgtagaaaacatcagagaagaacttgctggcacaggtcacggcagcaatgaccagtcgatggatattaaaactatcaacgacaaagaaatgtgaaagtgcctcggcatccgactgaggtgaaagggtaggtgaaattgtaggattcgacccttgcgggtcctgcgcagtaaagcctgttgatgagggcgggggggtcgccattaaagaatcctgcgcctgatggaccccaggagattcagtagatgcggacgaagatcctgattcttcggcagaattccaacggtggtgcagctggtcgatctgatcacggttgaccagctcggtcatgcggtcgaagtagaccagcaagcttagaaagacttcgtaggtagtagggcaatatttgtggatgcgagtcaagtaactcaagatggtgatggtcgggacattcttgccgtgaaatgcgagtacgctggtagcctgtgggctaaggttggatgtgccctcgggcggcgggatatggcgatgtacatgttcatgatgcatatcgtttgtagtcgtgatcttggtcagaagcccagcgaccatctcgataatctccgtgaccggcatggagctaatctcatattgtcggtggtgcgatccagttccgggagtgtgtgagctccgtgatctcatcaggtcctcactagcgagactctgaatatgggataagctttggacgcgaatgcgactcggcgaactggcttcggaacctggcacagactgcatggactggtaggtgggttggagacgcggtgaatccggcgctgaccgattagaagagtatgagttgctcccagtctgggttggtggggtacgtgttgagtgagagtccggaggaaatgcatggctcggatgagacgtcatcgagggcggtcgtggtatgaagataggagtatcggaagaagcgcgggaagcttgagaaggtgtgtatgggtcgatgtaagccggcacatcattcgcatgcacaggaagccgagcagagcctatggacggtggggcagtagaggtgggggtggaggaggaagtcgagtgagtgtccattggctgggcgaaagaataaactgaatccgaattgattgcgcctcccaacgtgtcgatatgatccgacggcacgtggttgacgacgacggagcccatgtcaaggctatcgtggtctgtttttctgcgggaacacgggtcagcaaggcggtcgcagctcgggctgtgttgccactataaaccgatgggagatcagatgggaagaatcgaaaatgatatatggcaataccaaggaatggagagataaagagagggggttgaatacactttcgactaccacaagggctagaccacagatcagggaaaaatccccggttcaagacgagagagagagggaggtgggagatcagcgacagccgatcgaatccattgaaaataaaataaaaaggtaacaggcgaaagcgaagagaagaacaggaatagcaggaatactaacaggaataacaggggaaactaacgcgtaagtaatatgggaagttggggaagtggagggagtttgggtcaaggtgagatcagtgaggtcagtgtggtcccccggagacatatgaaacaggattaagacattgaacatgggctttataattgctgtttagactaaatatgatataaagactcttctcaagactgttacacacctttcactacaaagactcttaagagtcttcaaagagattatcgccgtactcatcaaacatataaaagacggtgtacaatgatgtagagctataggctgtatattgacgaatgatagaaggatctgcatccccgtggacaagtggtgattcagacatcggaaatgtcttagccctatttaccctcgccggaagggtaatacgagaaggaatctatatgaatgtggatatttcccgtatagaccatatgttgtacatctccctttgtccggccatagacttgcattacataggagcatgacagtttgtctgcatgtgggatgtgacctgttctgcctatggatctcccaaagtctgggcagtactgttctacagagtattacagtaccagatcactcatgcgatttggtaataggccaagatatataaatctggggttctccccggtctattcaagtaactataccactcggcagttatgacccaatagccagctggccgagcacttccgatcgagtccttgagctgctcggtccttttctccctacatagcccgataaaggtggggggtatagcagcacccgtacccgtggactagtgtcagacttgtcatattggctctcagacacagtatatccccggtgggggcgcatagctaaatgcgaaaaccggagaactgggatcatgaaaccatttcattggagattgacacaatattagatcacttattaattcgtcactcccggcccagtgtagccgttgtctggcaggtagagatgtctcacggcaccggccttggtcaggaccacgagacgaatgacaccaccggagctgccgtcccatttgatcgcctcctgcaaagcacttcgcacgaaatcgatgccctcttcctccgtcatctgttcccgccagtgggcatcggtataaccgtagatgtaggtcgagcccgaaccgccgatagcgaacgactgcttgtgaagggatcctcctagcggtatcgagtacacctgacctccgtgtcgtgcatcccatccggcaagaatgatacccgcactatgattcattagcattggatttggaacaaatgccgatgatccaaagactcgggtacagacctcagcgcgtccttgttctcataacacaattcctggaagagtgatgcggcaacctgtgtggtaggggcctcggtgttcgttacgccgtacatattgagatggtaagagacaatgtcggccacggcttgggtgtctgcggcggaacctgatcggcagcaccagatggtatcgtgcacctgtgtcaatttgtcggtgactcggttggcaatgtaggcaccggtggttgttcgactgtctgcacccaggatgactccgtctttgaagttgatagccatgctgttggaacgttaatggaaatgtttctagatggtaaggttcaagagctccagctcaactcacatcgaggttcccaagctgaacgaagaacgatgggttagtatatgctgtgaagctccatggttgataatctcatcctgggtttaacttacttgacctcgccggacttcaggtggttcatgtcgatgtgaataccatctagagatattagctggttgctgtcggcggatgacgatagctctcctcaccttcaccgagcattcctgatgttccatgagtggcgaccattttgtgctgtgttcaggagaaagtggagaaagtagatagatgacttcaatagacctgataaaagagcaaggagaagagggaggtccagggaagaagtagaggtgatgctatcatgaacacaggcagaagctcacaacgcggcagctcgggcggtgaggccccagcccctgcgattgacttatcatattccccgcgagactcctgaagctcaaattcccttttcttctgtggttatccctattaacttaccgtattcatctcccgtcgcattcaagatctcttctagtcgataaattggcaataccagagtccccatacctcgttttctcgcgtcctctatctggtccccactcttaaagtgccagcaccatgtccgaatcccctccgcctccgtcctggagcatcagcaacatggccaacagtgctgcacaattcatgcgattgccggttcttgcatcatccggtctggctgttgttgcaagtgggctcctctacttcaagcaaaagtacgctattagcatctaggccatttgtttacgaagctaatcgctttccccagtgaactaatttatccccgcaatgtccccgtggatgcccgcacaaatgttcccagtcctcgccaatttggtatcaccgactttgaagacctccagatccccactcccgacggggagtccttgaacgccctttttcttcggcaacggccaggccgcttctcgcgcaatgtgacagttctaatgttccacgggaatgcaggcaatatcggccaccgcgtccccatcgccaaagctttacaagatacacttcaatgcaatgttttcttgctagagtatcgcggatacgggatgtctacaggcacaccggatgaagccggccttaagatcgatgcccaaaccggccttgattacctacgacagcgcccagagacaagggataccgagattgttgtctacggacaaagtttaggtggtgccgttgctattaacctggttgccaccaacgaggaggaaggtgatatcggaggactgatcttggagaacactttcctgagcatccgcaagttgatcccaaagtatgttttcgaattatcagaaagattcccgtgcgataatactgacttcaaaccagtgtcttccccccagcacggtatttggcacgtttctgccaccaatattggaccagtgaagatgtgctgcctaagatcaccaaaactccagttcttttcctgagtggactcaaggacgagctggttccgtgagtttgcctacgccaagcgtcacgctttctttactaatattccttagtccgtcgaatatgacacaattatttgccgtttgtaactccgaatgcaagatctggcggacactcccaaatggcggtcacaatgactccgttgctgagccaggctactttgagcacattctttccttcattacggaagaagttctacctaataaacagtaaaccgacctgacttacttatttgcttgggcttctcgaatccctagcgaaccctttgcctaggacctcccttcccgggttttatttcccgccaagaagtgcaaagacttcaagctttgctgcaattgcttggctatctcgctttccgatggccaatctaaacgtctggttaggcccttacaacataagactcaattgacaggaaccgttgattatgaccttgatacccctgccgcgcaaccaagacacgaatctcactttgcatccgttcaaacgatcacggcccatacatggccctgatgaattcctttattatccccgagtcctcggggtgaaacgccatacctcccatttgagaatggctcttttcttctttctatctcaccttgtgatttacattcgattcttgtttccttcttgtttcctccttgctgactattatcatactcgcggtgcttacaagaatatcgggcgctgggcgtgtttcttttctctgcttcatttttcggcgaacccttgcctttcgccttgcttatcagctccggcaaatttccttcttgtgcaaatactaaaccaagagaaccctttgaaatcgggtacgaatgtaataatcttattcatgattctttcgctgtgcagtcctagatccctaccaacgacgggctacgttggcattgtccggtcgttctaaagactcttgagcttacttgcaaggtagaggggaagcggaacccccgggatctaaagagcgaggtcactaaacaagaagcccattatccccttgggtggccacagactcggtaactatcagccaatgggcaccggccatcggcactttatgtatcggaatattgatcagacgatcaaggatatttggcgtcgggttgtggaggtgcatagaactgcggcgactttgggtgagaggtccggggattggcgatgataataaacagatataatttgtgttttggtattggtgcttgaatatattagaatagagatatttgccagcgagtgcattctttgaatctgaggcaagttgaaataaaataatgttcggttgctgtaccatgatatatatcaccgactcctgactgatacgattattctttgaacgaacccatgcatgataatccacaagcacgttcgtgtcacttctttatttattgaaaacacatacatgcatgtaagactggcgattaggatggcgatttactagaaatctgttttagaatcagtggccaattctttggaaatacccatgtctattattgaaaccacgagagtttaaagtcccaaagatatataaaacatcagacaaatggaatggggagatacatataatacacgccacaaggttttagtacaagagaaacaaactacggaagtttctcggcctcttccaccagttcctcaaccttgaagttctgaacatcaccccgggtgaacatgcgaacaagctcactcttccgaccagcagcctgtccctcaaagtcatagaagcgctgcagacagctgacaagccatgttgcctgtggggccgaaacaccgccctcgggcataatctggccatgcataagaacaagacccttctcatccgctagatcgaggtggtgagtaagagtagtgtgaggctgggcaaacgagccatgcatcttgtaagcagccagattcgtgaagataacagtagaggtgtggctattcgaaggcgacagagtcgatccctcagcaggcgggtggaaagcccattggaggaagtgaatatcggcaaccgtgccaacggctccctcgggcgattgctctgcctcttcggcagtctgcggacgcgggaggggcaagatgaactgcgggttctcgcgtccggcatgcataatgcgattgtatgtgtcgagagggatcaccgcggtgatggcatacgggttctctgcaaagcggagacgccagagcgcttcgatctccttgactgggagctcgcggaccttctcgatatccaggtaggagctgagggccttgacggggctcgagtcgctggagacagcgcgtgcagccttggcgatgcgcgattcctgtgggggagggggtgctttgaatgctgggggtgtgcctgggacggtggtggtggatgtaggagctccaggctctggggtagctggggtggatgctttgcggcggagttctttgattttttcggtataggcttccttcaaagactcgactgagtcatgtccctccctggataaaatacttagcaatatgcaggaggaattgttcaggaaagtttgctcactctttggccttctggtccagcttggaccgatacttttcgaagacatacttgggatcgtggtgtgaggcgaggaagcggacgtcgtggacttgcgcccaccggcgctgctgatgacgcagcaagtgggagttgccacggaccaccgattggaatccttgtagtcggaatgatggcattttgagtctaaagagtaaataaaatgaagctccgaatctcgaaatgccgggccggactagttatcagatgacataattactgacataagcatattatttgttgccatattattaaggcacaaagtgaaataaactaggcatcaatattacctcattaggacatgtggcttccttatattttactgaagagtaagtatttcaagaatcctcactgggtagaccaaccgttagctactatgcttctgcgagcctggggcggtggtgagcagaattgccatattgggccgtatcggagagaccgatgcaccgttcaacacagcatcaagaggattctttttttttttacccctcgggcttcagagtaggtagccataacatgcaacaaaggactaccaagaaggtaagtattgatatacggtaaaagaaatcgaaacaagacacgtctagcttttctagcacggtatcaattctccaaatctctatgttgagctttccaagttacacctcttgatcctttgatctgcaaatagtcacaaggatatttttgtttcttctttcactgttcgaagtaactgacttgactcttaaagcaaaaaaccgtcaacataccatctgtacctacctctgttagctccaatatacgatctctgtttctacggtatatccttgcatgtttctgaggaaatagattgattgatgttcaacagaaaacctaagtgccacctaatgattgcaaaagtctttcctaccaattcacatctccatacatccataactcataactatacacctgtacatggacccacctgtgcccattagtcagcacatcattgcccaaccaaggctgctcatgtggaatgggccctgaactataactttaaaggcaccgtcatctacctaaatccagctcctcagaagcaaacccctcatctaccaatatcctcatcttttcgacatcccaatcttccccatctcagaaaagggaaacaaataacctaaaaaaaaatgccaatccatcaaaaagaattctccaccccaccaccccatccaccagtgggcacgcccaaggactccccgtccgcactaccctggtactccatcgcgccgggggtatgggaatttctgctaaatggcgacggagagcacaaggctgtgctacagtggtgggagccaaatactgtctctgcacagacagagccaataacacacacctacatcgaagaggtctgcactctgcgcggcgggctggaagatctgtcgctcggacagacgtggagtattggtgcctatgcttaccgtgagcctgggatgaagcatgggccatatcgggcgacgaaggatggatgcctacagtttgttaaggtcgtgccggcgaagaagtagggtttggaggcttggattttgagtgtgtagctggggtctacggacattaatggctacatctttggctatatgagatttgggtattgatgatttggccttttttttggagttgtgttagagtgtctctggctagttgtttttttctttctttttgctgcaggctatgccaaatatgacacattaaggaatgaacaactcgagaactttatgcaaggagttaacaaaatccggggaagcgggtctgtggttcgaatcacgatagaattaatacaacttcattttcttctctaagaaagaaaaaaaatggtggcctcccccaatttgggtgatctactcgtttaaactagccgcgtaacgggttctatgcacgtgtgttgttagcgaatctcaatcggtcctacccaaacgaagggaccagacgggccaatacctgttaggattcctatgttctgagagatctcgccctggcttgaacacgatctccggattcttgcggttaacggaaggtgtacagccttgggcccagagactgcaccgacggtcagatacaactgagccaagtggggcttggggtgaaataactagtcggtctggtcataacagaacctttttaaaatctttctagggatttgattggctggatcttgttcttctcagttaggtaataatgaagctattcagagttccgaggtccttttgatacaatattctatcgtgtatgatgagactccaaactccaagttaatgcaaatgatttcgcaaagaaagggacatgtccaacgcttttgaaacatttttcattttgtttctcaggtcatcaatcatcagatcctgtccgaatccgaaggttagaccagcacatctgtaacaaatgcttcaacctgagttgcctcagcctgagtggggctatcttccgcagaagtctcggtctcaggtgcaagttcagattttccctcagggtcctcacggacaactatttcctggtcctggtcccccgcttcctctttctcttccttctcctcggcctcttcccaatcatcaacaaccgcagtcgcaggggccttcgcacgccaggacttcccaaccccaacgccagatcttaaaaccaagcgttccttcttcgccccgtcactatcgagagctgcataaattgacttgctcacccacgggttctgagcaggagttccagctctcgaactagccccgctcccacccttactcttcgaagcaacctgagcccaaccaccgtctccagtactagcctgtaccttagcggcttcacgggtcgccttagcctcgagcgcggcgacacgacgcgcttcttgttctttgctgcgctcccgctcgcggagcttgacgcactcgcggacgctcatgccgccgataccgatggtcgagccgctgcccataccgaagagaggaggtgtccaaacaaccggttttaggacgaagacgtgacgatgaggttctgggtcgtggctttctgtcacgaagccccagtctgcggcgagggagtgcgcaaatgcgcggagagtggatttcgccggctggaagcggaatgagcgggtgggtttgtctgctgctgccagggtgtggagattggactcgtaggtttggagagttgataaaggtaccgagcatgcgagctggacatattggttcagagtctcttccgagtaggggaggttctcggctgtgatggtttgaagcgtggttgtctggttgatgtcgatgccgagagcacctgctagggagcggttccgctctagacgcgtgcattcgtcgtcgcaggccaacggggtcaactctggctgccgctggggcgtctgcacctggcccttggaggttacagccttggcggcattacagcgtctgtcttgtcgcagtcgcccacagctacatgtcactgcgatcttggacgaacacggtgtcttctctggacacgcgtatggcgcgtggcattgctctgtgcaaggatggccgcacaccgtcttgttctttccacagggttggctgcaaggtttggttgcatcttcgcaatcctccgggcgatgacagtccttccggcagaaatgagagccacacttgagcagctgcccgcatacttgaccgcagcgcgcatctgtcagccagcagggcacatttttcaacacccgctttccgcacagacacgccttctcggtcaagaatggacacttcggacagttctcctcgtctgtgtggcaggtatgtgcggcttgaggatggccgcatcgctttggacgctcacaggggaagttgcaagcaggtggctttgcaccacacggctgcggcggatacagaacagatcttccgcaattacacggaatctcttcgaacactgcctcccggcaggtattgcaagcacccttatggcaaacctccggacatgtgtgccttccgcatttcagcatccggccacatacgcgagtgcagatatgctccgcttcgatgtcctcatcagcagggcggagatgagacctgagtttacgacgcgcagcctggcgctcgttggccctttgctctcccggacaacacctttcagtgcatgtgtgtcgaccacagtgtagagtcgccttgcacatgcgtgggcactggggaggctcattcttgccctgatgacagattgtcaggttattagtacgaccgcagttgcacttgatgtagacattgcgcaaacaagcaccgcaggatccaacatgacacagcttctcgcaaggatggccacatggtaatgttttcccacaaggcttttgacaattcaagatagggtcttcgcaggatgttcgaggtgtatatcccggggtctcagataacggtgtcttgccacaggcgcaattgaggatgacatctggtgactgtggacagtgtgcaggatgagggtcttgcggatgacagttcttctggcatgaatgtatgccacaatcaaatggacggttacaagtctctccacaagcaaagcagccagtccactcatcttccgagccatcgtcgcgaatgattcgactgtcctcctcatcgtccttagacttacacatcatctccgtctgcagttttccacagtagcaacgtgcatcaatgctaacctcgcacccaccacacaatccctcatgacacggaagtggacatgtatgttccccgcacggcaacaactcaccacagatttcgccacagctccatccattctcataatcggtatcccgacaacgcttctgcgacgaattacggccacagaaacaatcttgtatcggacccatagcagtacaaggtgtacaaggaccagcatgacaagtcgtgtcacaaggatgggggcaacccttgcgaggccgtgaacaagtctgaccacacgagtgcggaggtaaaccgggaagtggtcgaggatcgacctctttctcacaccagcaagagtagctcgagggaaagttttgctgataaaggttacagcccggacaacgccaagcgcgaggagtggtaattttctgcccgtcctcttgagcagaagttctctgtgcggctgcaccttcattcgtggaccatttcttcacacagctcagatggaaaacagtccagcacagctcacaagaccagacccgagacctgcgacctagctcgctgcagcagatagggcactcgtacaggttatgcgatatgtcttcgtggatgcgggtagccagatcgtcggctgtggacttcgctgtgactttaggtggcggcgccctaggctgcttggctttccccttccctttcaaggatggcgttgcttcagaagctcgtccttgctggaatgacggggcgcccggtacaaaatccggcacttcgggtcttaatgtgttatcatgtgaatgctccgcaccatccaatagagggccatttttggcctggtctggtcttgtcaacttggcttcgaagccacgcgctctcatcccacgggttcgcgcctctggtcctgtctcttggctctcaagtcctccattctgacgaggtccattatttctttgtctgcggccccttccttctctgtttccgcctcttcgcgaattggacggtccatcttgttgattgggctggggtatcgtattcggctgtggttgagactgtgtaggctgtgcttgcggtgtagcctgattttgaggttcaatcgcaggggttttttgctgaccgtccggcttcgcagaaccccgccctctgcgtctagatggcctggaagaacgtgggggtcgtggcccagttgggattgaagtctctggctgtgctgttgccatagctgaaaatgcagcggatgtctgactggagactcctagcgtgctcatatgcttccggtagtctttctcacttgcgcttggcttgaagagggtaattggtagtcgactgagtgtgttggtataacgtagactagaaaagtactgagagtgaaatgagcggaagctatacactgaataaggcaacgaggaggaaaatcaaaggcaaaagcccgcttatagaatgaagagagaaagtgtggcacaacaaattatccatgaaggcgataaaagctctcctggcagaattgggcggtgcaggaggcggtgacacagtggcaagccgctcaggtgtgagtcaggaattacatcacatgactcattgtgcctgtgccccggtggtaatgtgggccggcaatgtataaattcgagtcatgcttcgtatctgagggatgatatgagccggtgtaatttatttgggcttggttgatgcatgcaatcacaaagtgagagggagaagaggggtgttggactccactttatgccaagacatcaaacaaagacctagtgaacgaggcttatatctataaaacagcatcttgctgcatatcacagaataatcaatcgggccttcgttatgtgctcgatattaatgagaggagctaactccttcgcttccatgcctactacaaacgaaggacactagaaaagacagccaaacacattatcaatgcaatttagtcctaatgctgaattaatgtagacaaaactacaaatatcgaacctagcgcatcaaaaaaacatggcgctatgcaaaataaccagcccattcacctcgtaacaaagaacatcgtttgattgaaatcatacacacatcgagaataggctctaaatgaacacaacaatctcaccacgatcgttacgtcttagccgtaacgcgcggaaaagatccttctcatcatcagccctgcgatcccggtccacccagccgcgcccattatcatgaccatgatcagcatcatactcctccgagagctcacggtggaagcgcttaagcgccttgttaagggagcagccacgctggctatcctttgggaccagcgagaggaagtgataggccagatcgcgctgcaggtcctcgtccgagcgcgccggcggccgcgactgcctgtagacagccacttggtggccgttcgaggagtcaatggagacacggcgctcgtcgacttgcttaagacggcgggagggtctgtcgccatcggtggggtttgagctcttgcgcttagatttacgggagtcatcgtagtcgtctgcgcgcgcgcggtgcgatttcttgttcttgcggacctcgagctggccgtcgccgctggagaaactaccgcggcgggcgtggacaagagctttgggggcggaatctgtgttggagccgttggtgctcgagacagctgaaccgccgaacatggaggagacgaggcggccagcgcggttcttcattgagatgccgagacctggatcaccgttgccgttggcttctttgccgttgcggcggctgcgcttgatcggggacgaggtatcttggtaggcacggcggctggtttcggggctgtcgtcgccgtcggcggatggggagcgcatcatccgattcaggccgccggtcaggccggaatggttcagcatgggtgtgccggcattgttgatgatgctggacggagcatccatcattgaggtgtcgactgcttcacccggggtgctgagaacctctgcttgaccgcgcttgcgcttcttctcgctgacagtgccgggggctttctcctcgcgacggcggtccttcttcttcttaggtgcgggcgtgacgaactctgttgacgcattcgggggcgatgctgagtgcgggatgttgccggcaccgtatgaaaagccattctcctcgaatgcgatatcgtaatttttaccctcgtcatccgtgttggggtttgtttcgacgcgagtaagggactggctgggctcgaagagcgatttggcattggggttcatcttcatctgttccttgggtgcggcaagggtgaccttggatgcgttcggagtctcatcggcgacgaggtaatcgaacacattgacggccttgtcattgttggccgggggaggagcaggggccctcacatcaccgacaggagggggagtgggagcagggggaggaggagcgttcttcagggcctcgccgtctgaaccgtcgtccacacggggttgctggtgacggccgttgggattctggttgggattctgcttgttgttttgtcctttctttcctttctggggcttctctttatatagagcaccctgatacttttgcgcctcggtcatgcatgactgtggtggccggtctcgttagcggatgactcccttgttgattcaataattaggaccctagtggagtagccccacgaccattatgcgaaaatgcgacgcggatccgacgtaccgtatgagctctatattccaatccgtagaaatgcaccatacaatcgatacaggtgaaggaagcgccgcgacattggccgcgatgaggatcgagctttttcttagtgagaacatcaccacatgcctaccacagtgattgttagcagcggttcgagcgcggcacacgcctcagacatcatataggacttacctcgcaagagaaggagaccattgttgacactaaagatcaccctatcaggtgcgcaaagaagattttgagggcgggatttttcaagaggggggttgtatcccttgagaagtccagcacaaaacgtctaagcgggggatttgctttgatacaaactgcgatatctcggcttttcctctcttttttttctttttcttttcgcgtcgaaaattggcgcgcaagtccacactagtctcgatcgggagccgggctaggctattttgggtaatatgaacagcctgggcgcgtcgagggagaccaaagtgtactccttccaactattttgggaacattcgtcgtataaaagaatgcaaagaatgggagaaacccctgatttatcatctcttgactcggcacatgtttcagggtaactggaaaggcgcagatcccatgcggacatggatggctggcctgtcaggagaccccatgctttcattcgcttcttcccaggatacgagaagtcagactggccgactggccacccttgaaacatcccatctcgacggctgtatgctatttttggccccaactcaaacactcttaccggactataccgacatatgctaagatccgtgatataccgccctttttgaggtttccatcatgctacgcgaaattagttgatctgttggagggttggtatcgcgagggtacgacctgacgacatcattgctgttgctgatagtgaagaaagtttgatcggtgctttgtgctaagacaagctcggtatgacggaatgcgccttttcgtctgctctgcggtttagggatactgtctaggcctctttggtcatgcgcgccatcttctacacttggtcaccaggtaggatgatctttgcgcgtagattgctcgggtcatgcactttgtagggatcggcaatctagaggatgcgggacatgtatactactactagtcgttgaccggcttgtagctcgctatcatttgtacttttataggattgaggtaggctctccaagtatctttattttctgacatgtgtaaatgagcaaaacccccaacagatatgctcgggaaaaagagctagaaactaatgataagaactttcgatacctcgagacagacctctttttatgccaaagccacatgcataacacaacaagggtatattgattgatattgacatagtcaacctacgatttataattgtacaagggagaccagctccataagcgtgtgcaacaaggtgtctaagaagcatccaagcgctgggtataaaccagacaggacgagccccatgtaatcgaaagaatagtcgaaagaatagttgaaaagtcatcccgtcaaccacgggtcgtcctaaaccacacattagcaaccaaacagccataaccacgcggcacaacaagaagtcactaactcttctttcgagatctccactgcaggaccatcatgctgccccgtagtctccttcccagaatcagaccgagaagtagctgacccctccttgccctcacccaccttatcgtcctcactgcagccgcaatcatagaattcccccagattggtgcagtcaaactcaggcttatcaagcatcgcattgacctcattatgaacgaagcaagcccagccagaagccgcattgcgcgacgaaacctgaggcggatacttgctcaaatgctgcatgaaatgctcagcacattctccactgatgtcatcaatcgttagtctccgatctggcacagagcacgtaggctaggaatctcattaccaaggatataaccgagcaaaaaggtagatataagagcgcagagcctccttttggtcttccgtgggcgtctcggggaaccgcgccatgacagtgtggaagtacttccaagtcgcacgacctaattcagctctggaaaagccaccaattctgtaatcagcaatttgtccaattgcgctcgtgcattgcccaatgtgtccctccccggagcaccttacttgactgtctcattgcctagcttcggcatcaccacgtcgcccttcagtgtgttatcttggatggttatccccggcgcggctgccggtgccgagtggtcgatgtggcctggagcgcggacggcgggactcggtggcccctgaggtcgaatgaagaggaagaatatgaggcatagtgcgatcgctgtgctgctgataatgcgccgtgtgatttgtcgattcgccatgtttggggcgggtggtgatcgttggggaaaagcaatgtcgcgaagcgtccggtcgcgggagcacctggaacttgtgagcagggaatagtcccacgcggaatacgagatagaagatttcagctgaggatctgagaaatgagtgctaaagggctttgaacgaaggggattccacgcttgggctccggggaggcacgccacagcttagtcatgggttcgccggggccacaagtgcgagccctagaagattcctaaagtgtctgtcatacgattgatccgtatgaaacaataacattcagagactctattcatactaggtgagcattgctctccgaatcatagactcagcccatagagacccacatcggatgtgctccgggtttcgacttctgaagtggatgcgtaccctactagtagtaatacattactgtgctcatggatgccaaacatatatatctacatcccatcatgagttccacctactgaaatcgagtcgctcaaacttggaggtaagtcctccttgcgtgtaccccagtcgctctccttgttcccaagtgtcagctccagcatcatacctcgagtaaagaattcatgtccaatccagttcttggtgtagggctttccattgagcttggcactctggatatatatattcttgtaggttttgtcaaagttgacattccgaatggtcgcagtctgattggtttcagggtgggtgattgcgacggccttgaagaacggaggaattatcaggtacacattctgaccgggattcgggaacaggcccatcatgctccatgccaggaatgagcccatggctcccgagtcgtcgttgcctggtagcccgctatgcgtggcgttgaatgaagatgggatgtaagcgtgggctcggctggcggacagaccagggcgtcccgcgtagtgataatcatacacggtcaagaagacaggttcattgcccatgtctgccaagccagaggtgtggaaatagtctaatcgagacacgaaggattctgggccgccgactatcttgatcaactttgccatgtcatgtgggacaaaactatattggattagcgttagaagctgactgggaagaaagagtacacgcacaatagatactcccagatgctggactcgaatgtctcggaaggattcgaggtgagagagcaccacgacgccagagcactacaggcaataggatcctgatagccccaggttccgttgatgtactttggctgaaagaacccagtaaagccagtgtctgttccattccctaggaacgatttctggtcttctttgtacaagttctgccagttgccagaccgagataaataagtggtgtaatcatttttgccgaggcccttggctacaacggacagaccgtagtcattgtacgcgtactccagggttcgggagatactccgtgaattagtcccaaatccaatatagtcgaagtccagatatggaatatagttgaggtgcttccagctctgcagaccccctcgcccttcatatgaccattcgagtggctcattctctgcatcgttgaccatagctttgtaggcaagttcccagtcaatacccgtcaggttcttcacataggcatctgcgagaacaatatcggcattggaacctccctgcgtccagcctttgcagagactcatgcggcaatcgggcagccatccttcgtgcttgaaggtgtccagcaagctacggaccatctgtgactgtgattttgggtcaatgattgtaaggaacgggtgctgtgctcggaaagcgtcccacaggcagtagaaagagtcaaagtatggctcgtcgcttttccatagtggattttccccggtcagatcttgaggtgataacatggtacggtagataccactccagaaactgctgatcatgtctttactgacgccacccgacgtgaccttgataggactgagcttttccttccatgcagcctctgcactcttacgtagatgatcaaacgcatcctccggttcaggcacttccgcttcggcatttttacaggcttgatccgagctgacaaagctgatgcccaccctcacagtcacaattccattctttggacgaccaaatgacatatagcctccggcttgaaggtagaagttgttgaagccgcgagtgacaaacaactcctgcactgatccagctcggtcattgacccagatcccggcctcatcgacctcagcgtcaccaaaatcagcacagaaatatgacttgtaagagccagccccgaaactcggcaagaaagtaccattgcctttaatttgacctttgtcggcgtcaaggctgatggaagcattctgtcgactatcccacagatcagttaaatccaccgagatcaacggattgagatcggttccatccgccaactttccctttgggaaggtaaatcgatacaatgctgtgcgccgcgccgcagtcatctcagccttaatgccattctcgagtgtcagggcaaagtagccaggttgcgcaaccacagaatcattcttgtagtgaaccgcgcgagcagctttagggaacttgcaattatccaagatattgtctttgcagtactgtgggaacagaggaaagtttcccatagacgggttcccgcctgtgccactgtcatgcatatgcgaaaagccagtgacattgctcccatcagtcgaaaaacctccggtattctggccatcgacatcggcgacgggtttcgccatgccatacgggatgcttgcacctgcaaagacattaccgccattggttgatccgatcaggggattgacatagtggagatcatcttgggttgctacagtgcctaggacgcattggaggagtaggaggctgcacaacttatttctctgcaaaattgccatgacgctctggaatgtgaagcttggaacatacgtaatagcgcgttgggtttgcggatttgggctgtcaataacacgatagacgcagaagatgggaagagagaccgagtcccttctgcaaggggtggtttttcatatcgctgtgttgcaacgtcgcattgttcatgcgatcgacggcctaaatagtgttagtgttggagttacggagacctttgagtgcggggttagtgtatccccaagtcaacaatgtactgaagcatgttttgcagttccgcattgccagatgaaagcgaaacaaggccctttcgaatcatcctaaggtattgacttcaaattatagccgtagagttgagtctctttataagtacagcctctttccaaggttgagactctggtcaaacaacgaatatttgataaatatagatcatgtgatccactctctggccacttgacattatcatttcttcgtcacttttatcattcacgaaaatagaacctacacttcatcttgtcatcccttatgccatctgcacgggaatctactgcatctcagtacaccagactacaaccaccaagctttcatggattgatacttccaagatgaacaagaaaatgccaataaacctgcccggtcttcctcttgagctgttgctcatgatatccgagcactgtcgacattgcctgtctcgcgttatgcagcgaccaattgttttttttgcttgggatctgcatgtcagtcacagcctgccaaagggccgcactgggtgccctgaggatgggcggcgtatcgattttctgacacgctttgcccgtgacttgccacagtattatctctgccacgcttgcctacgactccatatttggcaaaatgtggctctaccaggtcccaaattcaaagtcccagcctgcgtagagtccctcgatcgaaaggtacatcgcctcaaattgcctctttacgttatgcattacccaagccacgcgtactacaaattccattgtgttcatcttcaactttccatgcgaaggttttaccgtggagctcaatttggaatacccgttccgtcattgctctatacagaggctgggactaatcctatcacgaaaaaagcactgaaactcaccaaaccgtacgacgaagagaaatttcaatgtagtcatatgacaactttactgtctattgatgttcgaatctgctcgaaccctccgagcctttacttacgaacgcaagagcttgcggtagtaagacgacaatacctatcattgttatttccagatcctaaaaacgagtttatgcacgtctgtatgcatattaaccgtggctttaaattaatctctgtcgttcacagacttactaataaatatagctatgacccgacaacaaaaccccgagatcaagggcgttgtgataaaagcaatgcctcatggcaaatcgagatacggagtatgggacagaaagaagtgtgccttgtgttcacccggtggctcgacttaggaccaggactaagcccagacgatgatcggtggaggtgtcacaatgaccacgaattcgaagtcaacttggcagaacatgaaaaggttgatccctgacagcaatttgaaaatgactccacacaggccaattgctcggatgcgctctcaagaggaggaaatgtattatcgtaacatccgatttattcaaaatcagacatatcgaagcttgatgactcgctttggggtatccgactggtgcttatacgtagaacaatagcgaaatcgctcttcttgctgtgttgttagttggaatagcccaatgcattggtacttgaaggatataactgggggaaatcgcaggagcagaccaggttccaatcattgcaagcaattcaactcggcccatgtcgatgaggaatatttttgcttgtttgattgcatggggggtgcctgccgtttgtgacttgattgccttatcgggaaggcacctcctcctcctcatagcaatgactcgcctcctctacatttcctttttctttctttctttatttctttctatctttcttcgtcattgtcatagcttcgtttattgagacccccctgcctgcgcaattaaacaagcgaaagtacagtctatattctttatcgtcatgggccgagttaaatcgcttgcagtgattgggactttcatttacagacatactctaggtcgccatggtggacaaactccatcacattaccgacctcccattgcggaaatggtcccgcgcatcaggctacgattagacattaaattgacggtgatctgatcgtacaaaaaagaaacactaacaatttgcccgcttgcccattagccgtgtcaagtttgttaaaggagctgcaaattgctttcctttaccgaaagtcaactttgtcatggctgctaaccagttcatatattccaatggatgtagtggaacagcttacaattagatttgttctacatatggtgtgcacaaactaacagactgctttcttacaggtttcataaaaggatgatcaaacggggattccgacgggttcgtgggcgcagcgaactccacatggtggcaagggaggtcaacatcattcacgtagggaggggatcatggatgaatgggtgtggataattcaagatcagattagatgacatggcacgattgatttgattgattaatctaagttcctggagaccaaaaggatttttggtttgctcaaggaattcctcggtcacagccaatataaagtttttgctctcgcacgcgaccgttgaagggtgtgggcaagaaacatgatccgtacagagtactgataataacaaatagtattccatacgaagtagagtagtaccgcgaggcgcctcgaacgcttcgagacaatgcgatctagccccgagacccatcccgcatgtagaccttgcctggacagatagaagcttgggttaccatcgccataaaccccggttccgcgtatctgatcggaatcagataagtcaaaaaccagacaagagggcgtgaaagtcaaatttcgcggaggacccgaagaagatctcgttccacaatgctcaattgagttcatatggcgacttcaaaggccccgagaagatgatgattcatgcacgaggtcaataaatgcttgctgttttgggcactaattgggggctggaaacgaccttgatctttcctttgtgttaagcttctcgcgaaccttacactgtacaccgcgtggaaacgcaagggaccgggtagcctttcctagagggcagtaaggggaaaaaggaacatagtgagacagatgatggcatgactcgaataaaacggtcttcgtgatatccggccagcccttcaagtggtttggcgtaagtggtggacgcaaacgggatggccgcatcaagcaggtagcagccctgaaaagagactttgggcggggaagcgctagtccagaataggagggagactcgaatctcggccaatcggggctgcggcccccacaccatctaggggcttattggggatgatcgccgtcacggcagcccctgattgggcccaatatcagatcaactggaccctgtccgctcaccccgagattatctgatcgtcgcatcggagcctccgttcgagaccgaggaggggaaaaaaatggagatgtcttggacgactgcgggactttctggtctggaagctctcgggcctctgttcgtccgaattaatagaaaaaagaacccctctagcgtcgcagatctttcctttctccttcccatcctcccattccgcccaatactcaatccttgtatatcctcacacagtcccggaagcacctggggatctggcatccggtttgatttcctgatcggacgaaagggatacacagtaatgggtctccccgcgaccgctgaaggtnnnnnnnnnnnnnnnnnnnnnnnnnnnnnnnnnnnnnnnnnnnnnnnnnnnnnnnnnnnnnnnnnnnnnnnnnnnnnnnnnnnnnnnnnnnnnnnnnnnnnnnnnnnnnnnnnnnnnnnnnnnnnnnnnnnnnnnnnnnnnnnnnnnnnnnnnnnnnnnnnnnnnnnnnnnaagggccccccccgcgcccgctgaaggtcgggatgacggcaaaattatcgaccgaactataatcggggaggaatcacacagctcgcaaaatgagaaatcggagacacgcgaggacaatggcgacgggtcatcatatgatcctgaatcacctcccagattggacggctcccatgggggcgacatgctcgacgatgagaaggaattggaactgcaccccgacatgatcacggagggtgccgagttaggtcagcagaaggcggaagcagcagcgctcgcatggagctggccagctttggttggaatatatgcttggtgagtagatcgtggctcattcgttccggcgctcttgcgatgaaaccaattttctgacaatgaccgaacttgcaggatctggatctgcacatttatgttggcgttccactcgaatataagcggcttcctaatcaactacattcagggagggttcaagtccgcaccgcaggtctcaacatcctatatcctcgcgaatatcgtgggcggcgttcttaagctgccgcttggtaagaccttgaacttgtggggtcgtgctgaggctctggtggtctcgaccagcatttaccttcttggtatgatcatcctcactgcatgcaatggtcccaatggatatgctgccggctacgtgctgtattggattggttactactgcctatacctgatcttgaatgttttcgtcgccgatacctcgggtctaaagaaccgagcgttcgccttcggctttatgcagactccatttatctgtactgcattcacgggcagcattgcagcaaactcgatatacgccaatttcgggtggcgctggggttatggcatcttctgcatcgtgatgccgtttgtgttcttgcccctcgccatggctttcaagtactttgagaaaaaggcacagaaaaacggcatcttccgacgacagcccagtggtcgcacggttggacagtctatcattcactatatccatgaatttgatggtaaggatactcaaaccaaagctcgggatattcacactaacattctattactagtcattggcgctttcttgctaatgagtggttgggtaatgttcctcctgtcattcagtttggcgcaatatggccgctctacgtatgcgagcgcaaagtttattgctctcatcatcgtcggtgtcttcatgctgttcgtctttgcagcatgggagaaatggggcgcacgaacccactttatccgctacgagttgatcaagcggccgaccattctaggcgcatgtatactggctgccgtgctgtttttcagtttcgaactctgggatcagtacttctacaactacgtcttgatatcctacgatatttccgcagtccatgcaaattatatgatccagatttacaacgtcggctcttgcttcttctctcccgtcatcggagctataatctgggccactgcacgcttcaaatacatctgcctgttcttcggagccccgctcatgatcctcggctccggcctgatgatttacttccgtggcgcagaccacggcattggctacgttgttatgtgtcagatattcatcgccttcgccggcggcaccctcgtcattggcgaagacatggctgttatggcggcaggtggccgcgagggaactccgatgatgctggccctcatcggattgttctcgaatatcggcggcgcgattggcctggctgttggtgccgctatatacaacaatgtctttgtcaataccctcgcgaaacacttgcccgacgacttgaagtctaatgctaccgagatctacttgaatggtatcactgtgcagtcaacctacccatggggaacccctcttcgcgaagctgtcgcctatacgtggggctatgcccagcgtctgaattgcattgcttctactgccgtcttggctttgaccattccttgcattctggtctggaagaactacgacgttaacctgaagcagaacaagggtaagatgatcttctagaagggtttccgttgcacgggtgtctatgtattgtttatgtattgtttatgtgttcttttggtgcgcttaattctctgccgcgcagagagagggccgctactttcatttgtaaatttattataattatctcgttgagcgtggatgatgtgaatgtctatattggcaccaaggtgattggtcattttgcaattattagaaccaaagaatttttttcttcgtttcgcctgcctctatggcccatgtacacatattctaaccatgctgaatcacatcctttagtactggaattaattaccaaaatgaggcgacggcaagaagaccgcggtggggttgaccgcaacccgcgattggttcaagactcatacatccaaaggtcgactttaatttcacctctcttccttctaaccattggcatcaccctcaaggtgagatattgaattaccttcaccatgcctccatccgcggcaatgaatttacgcaattcctttggcgatcggaagatccccgatatctcgcgcaagattacggcatgtgtcttgtgtcgcaaactcaaggtgaggactacacggttctaaaaagagagctatatactaataccgatgcagataaaatgccatatgactgataataagcccccttgcagccgctgtaaagggcgtgggcttgcgtgttctgtcaataagagcctccaaatgctcttggagaatgatgcttcgcatgttgtccccatagcccgtggtttcacttataactctggctgatacataggtttagatggaaggaacagatggaagatcgaatgagcaagctagaacagtctatcgaacaaaacacaactcagccttctgcggttgcctcgggcaatgccgctctgccgcagccacttagtttcaacagcgtcgaaactgacattcccggcggtttatctaattccctacctctggagacacctgaaactgtcactttaaatctatcatgcagtcttggcgcatttccagcatcgtctatcatcaatcttacgctgggtaacattggagcagccccaggacgaaaccccgacccagtttcatgcggatatatctcacaggagatagcagaggaactcttcgtattcttcaagcaaaacttggacccttgcattcacaataccctcggcgagaacgactctttcagtaccatccgtacacgctctccgctcttcatcactgcaatatgcacagtgtctgccttttgcactggctccgataaatacagtcccttactaaaacatttcacaacccaagtctccgcgaagttattttcgtgcaatcatacattcgacgacgtccgcgcgctgtgtattggagctttatggttgaatgaagtttccaccgcgctgaacagtttaggtgagcgacagtgacactaatggtctcagatcttgcctgtcagtatactaacaattattcagctgttcgcatttccacagagttggatttgcacaggtgcatcacaaaaatgcctcacacaaaacgagcctgctatgaccgtacccggttatactggctggtatacctctgcgatcatcactgctctctcatccacggaagacctccccttacgcgagacttcttttcattaagaaggccacgagattttctgcaaagctatttcaccaacgcttctgacttaagtctaatcagccaggtcgagctgtggtctatcagcagtcgtgtctttgacatgttcggtgctgatattgagtacagtgccgctagtcagcggtcgaataagctgacgcagctgagtgctgcctacgatatatggctggaggaatggcttgccatgctttccttcacgaacgcaccgagcacattttcacgccgtgtcttcgatctttatttccattccgcgaaattgtatctcttctcgcatatttttcgaggctcgtcgcaggatacaaaactctccaactctgggtccgaatctgataccgacgcggacaagtttgcacacggcgcggcgagatgtgctctggcaattatcaggtgcattgtggatgacaataaatcatcctcgtggctgggaaaattaccaacctatatcgggactatggtggcatttgcctgtgtctgcttggtaaagatatccgtcgagcaaagaccgtgggctcaggaccttcaagccgagggtattcccagttaccttcagcgactagttcaggtcctcctctcgtcgccggttgtcaaccaccctacacatcctctactgagcattgccaggagtctggagactgccactgctgtcgctgggggtgtatatggccaagactctctagcctcaatcgatatgcgagatttggaccttgatctgggattttttgatatgtttaccagcgatacgttgaatgggtgtactgataaccacggtgcatttccagggatgtgagctcaacactcaaggccgcttcataatctttttttctttttctttttctttgcctttcgacaacttccggggcagcagcatatacctcctagaggacgcggagagtctcggagtcgccatgcacggctgcaacaaagaagacatcctgggggtcgcactctgtagctttctagtagcctcttgcgacggcaggattagttagttacagcttatacttaattttacccttggctgaggatagtttttgccctaaacaaaatgtcggcagcgatctaaggtggtctatttcatgtattctcagtagaatcctgaaaagtgcagcgaatgaatttcacactaaaagctataagggcacattagtagcattaacataaagagcaacctgggacagaataagaatatcaacgagaataagaagcattttcaaagcaccgtccatcctctgtcaatcaaatcatccaggtagggtgacaaggcccaggcagagccttctgccccaagctgaaagaacccaacgatacttccatcttcgttgtcatctacaacgatgggcgcgccacaaactccttcccggatcgaactagtagtgggcccatagagacggtaaatattctccgtaatgaactcagtgaacgggaccacgataccgggaggtcgtggtggacttcgatccttaactccagccaccccgagaaacactgctccgcttgccataccgtctgcacaacaccatgtattattttggacttcagtggaacggatgaggcgattcggaggctgggcttgggaaatattccccatttgtgaatgttgtcgacgggtaaagtttcaccaaagcgacgtcaagggcatcgaaccgttcgtcaatgtgaccaatgcaaacgcccccattctgagaggacggatgatagacctcatcagagttgataaatccgtgattggagacagtaagtctgatatatcctgaatcggtgtttctaagtttcacgccggcagttgaagccatggtggcatcgaggtaaccactgtctctgttagtaaggccacactccactcgcacttctgggcagagagtttggaggtcagtcaggaaatagttagtcgtatcctgaaccgttccaggtgtgatacagcgttctctgctttggcacgtcagaggccaaaacggcgtatgactgtggtggtatacagtgaggagaccaccgactcttcctgggagagatcgggtgctgtatgatcttccatcaagcgcgatctcaacaatgatgataggagcaatgtaattgacagcctgcactgtcacaagcctacccagggcccgtagaaccgcttcccgttgcttttcggatggtctctcccacttcggtagttgaaaatgcggagagaggggatcaggtagcctcgggttgctgtaatcggtgttcgttgtcaagtagggccagttggatccggcagggataaacgttgctgcaacacatgccacagtcaaagggattggatttgggggaaaacgggtttcaatgatgatgtctggccagctgtaggtcacactttccgcgcggaaggcatcgacaatccacttcctttcttcaggtgtaggaaagcggaaatcgtgtacatgatcatcccagagagagaacggggctggatcagaagcatttcgggcgccgtatccattgttagttacccaagtaaaaaacttgggctggtgggaagcggtgggttgttctggaggagcggtactttcagggtgggaatgcaacagcgtttcgtaagtctgttgccttgatccaaatgcgacatatggcatttggaagcgcagcgtttccaccgcagatagtcgttgctgcataccgtcccgataggctatgtggcctcggctatcgatctgaacacgggctcagacagacaggtatttgtgttgacacacttggggaaaaggcagtgatgtgacgttcagccggactctgagtacaggatgtagcagatgatgttgtctgagataaagtgaactaagtaacctaatttcaaagggaagtgacgatttcaaacggaagtgacggaaggatctatactctgccaggtacggcagccttatctccccgctagttacggagtagttagctaacttatcgcgctagcatgttgactaagcacggtcgcccctttgggtttagtgggtgcactctgaatattcttcttcgggaccgccatcgtagaccaatctcgaaagaatcggattgttattaggacaaggttgtattgcattttcgtatctcttacctagccctgtgtggtaagatttagtcttgttttctctcgcatattcaaagattgaattcaaagttagagtagaccagtgaacacgcttaaacccttccacgtattgcactggaatttttttcgttgatttctatttcgtacctagatcaaacggtctaccgtggctattctgtcagacaatatatgtatagcatcgggtttagtatggtctggggtgtatacctagggtcccgcgggaccatccgccgtgttcccgcggtccacggctcgacggttagattatgtaatccacaatgaaggtcccggggccgccaggccactgtgagccaatcacgcaagtgtcatgtgcagatcccccagaaagtaccgaggtcgggggcgcgggtctcgtttgtccgagataggaattgggagggctcttgcatttttcttggtttctttgttaataccagatccgattctgaatggcaaccatcaatgccatcgcgtcggagtcacacgaaatccaggaaagggtgtttggagtgtaaaaggagacatgtcaaggtgagtgacaattttactcccctgaacccgtcggtggatgtggttcgggaatgtgcctgaatcgtggctcaaatagcctttacggacggcggtgatccaccagccgagacccaattctgacggaaaggccagtgtgacgagggcatcccaacatgtactctgtgcaggaagcgaaagatggagtgcagatatcctcctccaaatgaagacgaggacagccctatggaatcatctagtgcccaggaagaaacagagagtggcactgtgaccctaccaagggattccacacaagcaacacgcttgcttgagacgagattattccaccagtatatgacttcaacgtaccatacgctgtcgcaggatggactgtcaggacaccatctctccatgaccattcctcgcatggccgcatcttgcccttacctgcttgacagcatccacgcattctcagccttacacttggcctcggttgaaactgataatcgagctttatggctgaatcatgccgtgcgatatcagagccaggcatgcgctggactaagtaaggttcttccagaaatctcaccaccagattatgaaccagcatttgtctcgtccatcatcataatgctatttgccatgggatctcgagtactgtctcttgaaaatcgaacactggacccgcttttggttgttctcgaggctcgtacattgatgtccggccccgccatgcttttttcccggatacttgaaggcggggttgacgcacagctggatggatggctgtgcactcctgacacaccagaaagcctcgaaactgggaaacatgatcagtatggacctcctgctctctggctcatcggcgaaaggttgaataataacatgaaacagtggcggcaacccagtcgagaacacacatgtattatttagcctgcacacgtatgttccagcgatgtatagagtgacggtgtagggcttgcgaagctgataatagaggcagggatttaatgatgtcgttagttcgacttcgtgcgatgattgacacaagggaaggatcggatcaaccgatctactatggcacatggcagcagttgcatcgggccatcgagccgtggccaaaaattggaccgcatggtggcccccttgcatggcccttattcctctccgacaaattttcctcgctgctccaacatggcgattggattgcccgagttctgtttctgcattatggtatagctatgcgtctcctgcgccatcgatggtacgtgcgcgactggggtcgtcggctagtattggccacactggaaacactggacaaaatccctcaggagtgggaggagaccatgtcgtggataagacgagccgctgcaagggaggattagtcacaaggatgataaccagatcattcggggttaaatattgacaacaaaggaaagtccaactgatcaccgaatcatatccacggaagcaagaggttacatttagacgatttggagcatggaatttgacccaatgactccgaaaaacccccgcgctttgacaatttgggccctgaagctacccggtggcttatcggcggggtcgaagcttcgggggttttacacttaacacaccgctacgcagtaggtagatttaatggtattggaagacacgcaccgtcaagatatctgatccttgattcctatccttcaatccctcgtccctcgatgccagttgcattttctgagcaacctagagcccgccgatcctgaaccaaagcgtccgaagcgaagctggacgttctccaatcgtgacatgcaacacccctgtcgaactagccaagatgtggagaaacaggtacagctatctctccaaggttcccctctcggttattgtttttgcccgattgaaaatattaatattggatggcgtcttagcttgagttggccctgccagcatcttcttcccctgtaccgactcttgggcattgcgtaccgcagagaaattggaggcagactctagtcaacatgctacaaccgatcagattaggcgttttagcgattctatcgctgctgttgatcgcaattcatctacccactgccaacaccttccccttggagttctccgagcgagacacgaatgctggccacgggtcgcacggtaagattggtcctggaaagctgggcgctgttgctagcgaaagctcaatctgctcgcgccatggatctgatattctggagaagggcggaaacgctgctgacgctgtgagtatctctatctgggttcgttcgcgataagggtgaacctcggtactaataatgacatagttggtcgcgacacaattttgtattggtgtcgtaggtgaggctacatcaatccgctcagtagtcgtatctgagcattgctaacggatacagggatgtaccacagtggaatcggtggaggtggctttatgctcgtgagatcagcaaagggtgattacgagtttattgatttccgagagacggccccagctgcagcattcgaagatatgtacaaaggcaacgaggatgcttcaatatacggcggactagcaaggtaagacaagtacgcgcagcagatcggaaccaggctaacaatactagtggagtaccgggcgaagtgcgaggtctcgagcacctccataagaaatacggctctctcccatggtcgactgttgtgcaacccgctatccacacagcccggcacgggttccctgtcacagaagatcttgtcaaatacatggcatctgctgttggcactggagaggacttcctgaccaagaaccccacatgggcaattgactttgctccgaatggaactagacttgggttaggcgatacaattacccgacgacggtatgcggatactctcgagactatcgcgcagcgtggcgcggatgcactctactcgggccccatcgcggagactatgatcaatgctctacagagcgagaatgggacaatgacgctcgaagaccttaaaaattacactgtcgccattcgggatatctctcagattaactaccgtggctacaagatcacgagtacgtcggccccctcgagtggtagtatcgccatgagtattttgaagatcctgggtacatacaaagatttcttcacgactgaacaatctgtgaatttgagtacccaccgattggacgaggcgatgcgatttggatatggcgaggtatgaatgcctaactctgatttcacgggtggactctgctcaatggtcgcttacatgaactacagagatctaactttggtgatcccctgtttgttgacgggatggccaagtatgagaaggagattttggaacagtctacaattgacgacattcgatctaaaatctcagatgtgcgaactcagaacgtatctgtttatgatccagccggactggaaagcctggacacgtaagtcctgcttggtgcatcattctttcatataaagctaattctatatcagccctggaacttcccatatcgcagtagccgaccacactggccttgcaatctccgtaatcaccacaatcaacctactatttggtagccatatcatggtgccagaaaccggtatcatcatgaacaacgagatgaacggtatgtccatgaagccaactctaggtcacgggattaactaaagatctcacagacttctccattcctggatcatcgaactcattcggatacatcccctctgtatctaactatgttcgccctggaaaacgccccctttcctctatcacgcccgcgatagttgagcgacccaatggcaagctattcctgattgcgggatccgccggaggcagccgtatcatcaccgcgaccgtccagaacattatccattccattgatcagggactctctgccgccaaagcgttggccaaaccccgtctacatgatcagctgattccgaaccaggtcagcttcgaatacacttatgataatgcaacggtcgcctccatgaaggcacgcggtcataatgttacttgggttgctccggggcagagtactgcccagctgattcgggtcttgcctaatggaacattcgatgctgctggtgagccaagacaactcaactccgctgggtattctgtataaaatgggatatattgtgtagatgccgaagtacatacattgtcaagtgcgcatcaatatagaagacatcgcatcgctatgaatagatagaccggtctagcaagttcaagtctttcgcaatgcatccctttgttgtatattgcagatccctgctagagtgacgtttctttatcgggtggtccgtgctttcgatattcctttttctgatgtaaagagctctaattcacttgaccttgtcttctccattagaagtctacgctgacgtgaaaagtcgacatacatttgtctttttcttgagtttcatatactagtttcattgacacgagatcgcgtcgccgtaccaaatttacacgtgaattgtcctgcgttcaagggagctagccttcgtcgtgatctccccgagaagagcacgcatttgactgcacagaagacttgcaggtagctttttctactccttgattgtcgttgagtttgcattaatcagactactttttatctgaacagttcgacgtaaaacaacccaccgcgttatgtctacgaacccttctcacttccccaacttccgaccctagacaatggctcgactcagcaatatctccgtcgtcgttcctcttccatcctttgacatcaatcccctgaagaaatttgatgaaaacttctttgatcgtgctattgacgacatcttgtctgaggaagcgagcattgaaggatcccgagacgagatgatggacggcgacattgacatctcgagccccttcgggtatgatggcacgtcggactcctcaaagcccaaatttcgtcgaagccaaagggtcgaagacaggttgtcgcaattttctacaccgtcgacctcctcgcctgcaactagcaaggcacagaaaccgacgccgagaaaatcctcgagaaaaacgaagcatatgacaatggaagataacaatagtaatgatgaagctcccgtgaatcccgaaaacgttacacgacctcagcacgaaaatgaagtcataaaagttcagtcctgtcccatccacgaggccggtgatcacccttctacacttcccggaatcactgagtctcccgcaatgccgattgatgacagtgaaaggacgatcgaagacacgatattcgattcagtgggtctagaaaagcggattgaggtattgaagttcatcgcatcacgtcctttcatgataaaaccggttcaaccggttcgtcgttcggacagacgaaaattcaatagccaactgcgcagtgtcgctgcagaggctggactgggcgacacagctatcgatgctttgattgagcacgttcgaggtgtttaccttgaggagcttggaattgtggcagcaaaatatgccggctctgcatttggggatgaagtggacggcgaggaagacacatacaccgagcgctcgcaccgaaaacggcgtaaaagcagctccggtcacaccgaggacgatgagcgtaagaaaaacaagaggcgtcactcggatccggcaaaaccgcacatccacgatgctctgcagcatgatgagccaaccaaggtagtgaaatcgttcgaggcagatgctctagaaagtgtccctactgaaatccaggacaagggttatgttgagctggatgaactgaaacataagaacaacacaccggatctacccaaaatgcccacgaacttcgttctgggtagccccagttcacctatcgacttaaccgacgactcttcgccctatggcaagtttgtctctcaattcaaggatgttttgcttcaaaaggaacgtgttgatgacatcggggagttcaaagatcttgacaagagcaacgaagaaactcttacacgtcgcttgtcacttgacgcccggaaagaggatattcatgagaaccgatcgcctgaaaaagtggtcgaaataaagccgtcgaagcgtcgtgagtcaagcaaagaatcaaagatagaaagaaaccgacgcaagcgcgaacggagaaagtcgcgcaacaaacattacatgaaaggtgactccgctggtggagcagagaagcagcttgaaggccattccgccgatggggcatataaagaccgaattccgccttccactccgccgcaaacctcttctgagaattttaatggaagtaatgcaagcaaacgaagctccagtcagcccccgctacccgccgatccaaatctgtgggatgaggatttttgagtgccagtgatttgccaggtatgactccaagtgatgaggtccagtctaagtatttcttaagagccgacaactccagagttggctcgaaacgtaagcgggaaacggcttcctcgctgtacaatttgtctatcccccctcaaacccgaaagctgttgaaagatttgaatctgccctcggacttcttgtcgtcggattcttccttgagtgatgcaccgagtgattttgattttgattctgattgggatgatctagatggtcatccgttgcatattcatatcaatatatccccccctaaaagcccatgtcttgtcccccaatgtacaaaccctgagcctaaaactccggtgaaatgcacctctctcgttaatccagaacgcgttaaaacccctcaagccaaagccccgaagcattctccttatttcccacctgtgctagttaattccgaatcttgcctcccgtttccccctatcgatgggtcttctttcggactcatccaggaacagcttgcacacgacccctttcgtttactcattgcaaccatttttctcaatcgaacccgcggtggtgttgccctaccggtcttgttcaaggtttttgaacgatatcctacgatcgaggcaatggcagaagcagactcaccagaactcgtctcgatgataaactgtttggggtttcaaaaccagcgtgcaaggaaatgcattacattggcacaaacatggctatcagaccccccggacaaaagaagaagatatcgcaagctccactatccacgaaaactggacggtcgaaatgttggtcgtgaagaatgcattgatgaagatgatttgcgagtcgcatgggagattgcacatctacccggagttggagcatattcccttgatagctggaggattttctgtcgcgatgagttgcgggggaaagcctccgattggaaagggacggatgcgacagaggtcgggtttgtgcctgaatggaaatgcgttctaccacaggacaaggagctacgtgcctatcttacatggatgtggttgaaggaaggatggatttgggattacaacacgggtgacttgacactcgcgagcgacaagatgatgagagctgcgcagaatggaggggtcgctcatgaagaagaggggagttgggtactagagacatcccctgtcaaggcagtaaatggattgcatgaatcggattgatatcctgaataccaaaagtttcaaatccactgatgaagttacctgtatatgttgccttaggcagtagaatctgtgttcccccagacaggtttcagctgagagggcgtttgtatatatctcatcggatttcaggcttccatgcagcaaaaaccacgtcagttgaaagagcggggccgagatcgttcaccgcataatcgcatagtgcgtttctttccacttccaacaatttcatgcgtcgtacctgaatgaggttattcgtttctttttttcaacttgagatcacattttcttcccccagaccccagacactcggaatgccggattggttcccgcacattgcgaccctaagcgacaagtcacgacggcagcccgaactaagcgccaggagaattggagacaaaaataggatcacattccgctcagtggcagtgcgactctagacaggtaacggacgattgacccttcgcgcggtccacaactcgattttacggatttcgccatgtttcctgttagactaaaccgcgacgataggaagtcgaagaccatcaagggcacgaagagcaagacaaacaagacaaacaggaagacctcaaccaaggaccccgaggatcctcccacggctcgctcatcaacttcccaacgcaggtcctccatgcctggactcgagaagtcggaggcagcctcgttccttgagtcgagaactagtctaccgtatcctaccttctcgaaggcccacagcaaggaaggcgtccgagcgagtattcctaccccggacccgaccgacttgacacatgacgaggggaagaacggtcaccgcgaggatcaccatgcgcctcctagtccgcccctgactggtctcgaccaagagtcgaggaagggcagtattgggaaaggcagtattatcaacgaggatgagaaggagacagacaaacccaagaagagaacaagtatcaaaatcagagcctccgaagtcaacaggtcctcatcgagtctccggtcgaaaccagatgataccaccaagtccaagtccagcaagacgtcacgaacggagacccctacaaaacacagaacgtccaaggatgagggtgaagctttgcctcgatcatcgagttacaagtctaagacgaaggtttccgatgacagaacgctgcccaaacgatcgagtcgctcgacaatgtctgcctcacagtcgaacgtcacacttcgtgataacggtggagagtcagtcaacgggtctgatgcaacgtctattgcccctaatcagcagcattcggcgccacgaaaacccatgaccccgcccgcgaagcctccctctcgcacgcagaaccgatcggccatgtcccgtcgtcgcactgctagcgacgagtcgatcgattttgtgaaaccagtgaatccaaattcgttcggcgcacccccgccgcccccacctccacctgaaatgcctgctactatccctcgagtcgattatttgctgaaaaatggtggtctggaaaacaaggtctcgagggcactgctggctagcctcgggcaaaatgatccattttcacaaggacaacctcagtcccaggctaacgccggcaaaatctttgatccatatcaccgtttactagacgactaccaaaaggtcatgagtaagaatggatctctggccgtggcaacaggctatcggtctgtcgcccggcgtttattggatcgcctcgaagccgtgttcgcgcgcgacatctcttcggagccatgtagctgtcagatatgcgatcgaacggaggcagacggtcgacctgatggggtgagctggggcgaggttttggagctcgtgtctggccgcagggaacttcctatgtggcctcccttcacgatggcaccaaccaccgtagataccggcgtgccaggcgatgagcatattccaatgcagaagcttgacgttgacgttcctgaggaataccgggaccacttcatacggcaatctcgaaagacgaaggtcgctgtcgacaaatggctttatgagcagaaagatccaggcaccagtgctcccaacgaggtcgacgacgaaacgttgaccttcgccatgcttacgcatctcgaaccccgccagcggtcgttgttatgctctttgctcggcatcaattcctctactcctgtcccgcggtctgacgatgagatgccccggcacaagccttcggcgcttatctcatcggcctcggccatccagcgtctttaccgactaccctccctccctcgcgatccagaaactgctatgtacatgttgaataaccctacactccaccatgtcctcgccaccctttccgccatcagcgatgacgagtgggaaattctcatctccggccgcttcgacggattcctccgcagcggcgcagaagacccaggccccaccaccggcgctcgctggagcggaagtcgctccaacacacccttaggcggcagtgtctcccgaggaccgacacccaactatatggacggcagcttccgaccctcaagccaagttaacggcgcaccctcatcccccgcctcgttcggcgggccgattgctctagacgaggaaaccgaaatcgccgccttagcagaagtcgagcgcgacattttcctcggaatggaagcccttgaagatgctttcgaagccctccactgcaaagctgaagtcgttcgacgtgcattgcgcgaacgcggcgccggcctctccgtggcaagccaaagccgccggggttccttcgtcgaagcgcgcctaggcacacccttctcgggtgtcggaacgtgggaaagcggtggtgaagacgacttcctcgacgacgagtgctctcttgcgcccgatgactcggctagtaatatcagctcgaaccggcgtcgtcggcctaagagacgcacggagcgacgcacgcctgcgcctgtcgaggaggaagacgaggaagatgatggtcttggccgtcgagatacgcgtccctcgaggcgtagatagatcggcacctggatttgaatgggaataattcttttcgatctacggagtacgtacagcgttggaattatccgaggactgtttgctggatagcattggatatggatgtaactgttgctgttgcaatgggcttgatgaactcatgataccccctcctactttcttgtcctggcttttcttcttcgtttctcgcttgttcttttgcttaactccacgcttggcctcctgctactttttatattttgctcttttgatgatttatgaatactacgagcttccctccccctaacgactagccatgcctttaggctatgatacaagtttgattgagcatatcccagcggttgagttgttagtactgtgcaatacaagtgaattggatctaggtattgaaatgatccctcgggacggactagataattaattccaacaaatagtagaaaggctcagtatcaacccccaacatttgacgcaatttatgtcttgtcgatcaacacacaccgccatctactccagctgccgcaaaggaagccggagaacacccccggcggcaacaggagccgagccgcaccgcgtcgtggaaaaaagtacgatgtacgaatcgcaagccgtcatcgggtatatcttacgacatcatccctgttgggtggatcaaatgaaccaatctcgacacggccaacggtttgtgatgcggacggccccaaaccagccgctccagccgcactgacaagcgtatgctaaatgacgcaaagaacaccatttgcggagtgcactgcaaagtattgatcaccggagtctcagggtatgatctgggtgatcctcggaagaagaaactagttgtgctaaagatcgataggctaagatcataagttaactaaaataggaaaacgggcccgtcaatcgaagcttcaattatgataggctgtgtgttatgtgtacacggctgaggatggagcgctctataagcggactatttaatatttgattaatgatgtcttaggcacattttggttaaattgcatgatgtatttgatcaatagatatctaaaaatgcaaaggagccccgagtgaagatgtatgctttaaggtcaaagagtggggattcggcaattggatagtcgatttagtgcttacaacataggggcatgcagtctgaaactgagctagttggatttctggaaggttaaggttctgaaaagaaaaggatgagttggaaaaggttgctggggatttaccccaaattcatcgccggcacccaatataaattcggctgttcccgattacccctgacgggatatctgagacatttccaaattgaggcattcttttgcgtaagcaccagtttgacgatttactccgttgatctcctccactagtccgtgctagccagctggaatcataccggacataaggagcctcctttatccagcttctcggaacactcgtgtctgtcccgtctactccacttgacagacgatgttcgtggtcggagcggatcgaagcttagcccggcttacggcagtgtctaactagtgtgctatatcggattttcctgtctatagtacggatctatttataagaaaggggattgtatctctataaggctgcatactttctatttgtaaaggtatatatatcagaagggggttaggcataaaaaagaggaaatataaatttgtagagaacgaaataattattactccgtagttaaagactgccgtaacctggtccaatcacatagccaagaggtcaagtgaccccaaatgccctaaatacataatccttttgttaaacaacacgggctattgcggggtggatctcacataaaattatgttcatgccggggtcctggcccactcgcccacattgtgctttgtattattttttctttgttcacttgatgtattgaatatgatatagcctaccgatcgatcttacgatcgtaaatgcctttgagcggttcagaaaagagtctgctggcggcttttatagaaagagatggcgatactttcaatatcgtagagtacaaagaatttaagatacacttgtcccaattcaccctagctagtactccagaagcctcggccccaaatggaatactacatatagggtattaaaggtccaagcccgctgtcaattacccaatatggcgctttggccttggatggattttgcgccttattagtggttctgagaatcaggggtgcgtctcctatggaacccgtttctaaacggccaatgcccttttttagtatgcacttaataccaactaagctaaactttgcggccgtttcattcgacatcccgtggcaaacttgtgtccttttacccacatgagcacgtatgccctaaataggataagtggagtacaaatacgctgtatacggggattcacagctctgggccgtgaactattatggagatcggaatccttcgtccaggtgtccatattttccactgactcgaacttgccgtggataacccagccattgaccgacaaaatggttaaaccggtttaagtctcattctcctatccttgcctaagttcaattagtcctagtagcctgggtttgtttctttctctctcattgaatctgaatttcacctttcatgtctgtcacctcttccctccacgagctattcttaatcttccactgcaggcagcgcgtggtggagatatagtatttaccaaattcaacctctcgtctattcacattcgcgtcggccttggatgtcgcctcttgttgccctggacagtgaccccaagaacgtgctttgcagcctacctttcgaccaggcaatgatagcagaatcttagaaccgaaaccatccgcaaacacattcgaccatgtcggcagtcattctcatgggcttgatacccggaaacaagcactcgttggcagctcgcttgaccacctccgctcaacttactatcgaccctctttcagaatcacatcgagaaggtctaatagcaatttcagtcttggccttcctctctctcattgcaacatcaatactcctcggtttcattacctatcgactttttttctggcgcagcagttatacacgttacatcggttacaaccagtacatcattcttatctacaatcttgttctggcggactttctacagtcacttggatttattatttctctacaatggatcttgacaaacaagattgagtctagttccgccgcatgctttcttcaagggctgtggctgcaaattggggatcccagcagtggcctgttcgtgtttgctatcgcgttccacacattccttttagtcgtctgtggacgtaaaatgtcccacaagttcttcgtctcattcgtggtcggcatttgggcatttgttgttttaatgttaatcatcccattagcacaacacggtcctggtatctttgtgctttccggggcctggtgctggatcagcgatgactacgaaatcgcgcggttatggactcactacgtctggattttcctcgccgagttcggcacaatcattctctacgctgtgatgtatttccagctgcgccgacagatttccgcctccgctatcctcgacaacagccagctggagagtctcaagcgcctacgccgcgtcgtgggctacatgaccatctacccaatcatctacctcgttctatcgctacccatcgccgcaagccgcatggccacaagccacggcgatacacccaacattgtattcttctgctgttctggggccatcatcaccagctccgggctggtcgacgtcatcctgtacactctcacccgccgcaacttgatcatcgactcggaacccagcgaagaccgctcctatcacaattacaacggcagcaaaggcaaacgaggtgggaacaacctaactaccgttacggctgatcccaagcacacagtcggcggcacttacattgatgagattgaccgcaacggctcgacggataacatcgtttcacccaccgcacatggctaccacgcccgtgatcaggaaatgatgccgatcggacaggtctaccaagaaaccaccattgtaatcacacacgagcctgcttatcccaccgaggaatccagtaagcgctctagcaaggagaacttccccgaccgtccatctcaatcaggatggcggggatgaacctttcttcacttctattcctatatccattttgtgatatgatgccctcaatacccatttcctgtcactaccacaaatattcgttccctcaagctgttttcactaccgcttcatgtctctctttatctccctcgtcttcctctgttttcttcctcttcctatgtctgtatactctcatcctaatccttttttatgacgaaaccttgtatgtatattttgaaaagggacagaacgtgttcgtccccacgtgaaccatggcgattcgcatgtgatagttaattatttcgaatctgaaggctcgtgatttggttttgattgaaagaatatccacataatttaaatcatcatcaagagccattccatcgtgactgaaaatggtatcccaaaacgctaatgagtttcagcagtcgaaggatattcccatcaagaaagctttttacagaaatatacacgttcgaacccatcctccattctgcgatctgtttccataaaccctagtttcgcgtaaaacccaatattctcaaacatcttcacattagtgaataatgttacactgggaagcctctgattttgagcttccgcttccgcgtggttgatcatatagtatccgtagcctcgcccttgcgctgttggatcgactactacgttgtcgattttgagcgagtttgtctgctcgtcctggtggcaggtgatcgaccccacgatccgctcattatctctcagaacgagaacttcatacgtttggagcacatggtcccagtcttctgtcatcggtgctggtggtttgccaatgcgttcaatgtatttcgaataggcggcatcaaccatctctttgatggctggtatgtcttcgactattgctttgtgaagtgcgagcttgctgtccgatggggaccttgggctgagagttatggtcatgatgagaaaatacagagtgaacagtttaaaaatactttatttgggagtttcgcgaggagaatagtcacaacatattttcccttgagttgtgagtcagaactaccccgccaagcgacaactttattgcactctttactcaagccagacatgattctcagaataaatccaatttgacggagctaagctaagaccttcaattcgacatgtatacttcgaagaaacatgatgtatcacaattgacaatcacgcagggggaagtgcaagcttcccagacgaccaacgcccctgagtccatacatactctgtaatcgccgaaatctcatgaccagcctggaaatacacccgaacctccggacgcgggccattcatccagctgatgcaatcaatctgcgttcccgggatacagtccgcgtggaagtgtccctcggtccaggacttgccgtcgtacaccatctcacacatcgtattcgaagtattgtaaaagacccgaattccgacggtttccgagctggtcatatgactagtgcaagctatagacgtccgaggttggacttttgggagcttggcgcctccaccataccagccgcgtttgctgtcgtagcacttctcgatgatgccatgctccatatgctggaaatacacactatcaatagctttagtactatcccgtgaaagaaatcccgaaagtagcaattaccggatatttggttcagaagtcttaaacacggtgcacgttatgtctgtgccgggcattgctgagcccaggttcgacattgtctcccagtttccattatctattccgctgtgagcagcggtatagcaataatgggttgatgacttacctttcagtccgtattcctgaatcgtgttgtttgccatctgacaatagaccctgttggtcacgtcgggtccattgaggtgacaagcggccagctttgaacacggtgctgtaataaaacactttttaccaagactaccttcataccaccctttagatttgtcataagtaacatcattgatagtgttctcggtggagaggtagtagactcggatctatgcaggttttgttaattgtgctcttgatagcttttcccggagaacactgacattttcaaggtcacttgaggtgcaggctagaggcgagtagggcttggccgaagcaacgatattcttctctgttccgttgctccatttgtcatcgtacttcgactcgcggatctttcccaggacatcttgcatatagacccgtaggtcactgcctgaattacaggccgcgatggaagtccctaaagaaatgatatcagccctgatggtttaaggagagtaggatattccatacgaaagacaatctcgtgggcttcgttgctgggcataatgcgagagttattttgatgtaatgagctggagtttttcgcgctgataacaagaatatttttatttagatcggaaagatcgaagaggtttataactgcaaaaggccaacattatgttttgcatgtcacgaggtcatacaagctgcctatattgggcacgaattctggagcattggaagagctctgattgtcggaatatgcgatgctttacacatgagtagccaatattgtggcacatcacgcaaacaaggcccaagaccacgaggagctcgcggattgtcaacgcacaagggaacaaacacttgttttgaacggaatgaacctaccggaatctccggtgggtggcaaatggtttcattaattgaggctctgggcaacgttgaatatgatgccatgtgatgggcggttgattgtactacgctatgctatatatgcagtcatcaagtcaagattccccgtcgtacagttcagagtaacagctcaagaatatgcatttggcaagtattctcggcgatatttcacgaaggagagaaatttggtgttttttcccgatgatccagtcgagaagtttgacattcgtaggctcatgtaggccaactggtcgcctacgtactcatcgagctccagattttatgatttcagaaagcctctcacctgttgaatcacagcctgttcgtgattctggtgttaacgtccggtacaatgactatctctccgctatcaaaatattgctcgaactctgaacagacaggaagtttactacgaagggaaaatatgtcactttcttttccaaaaatagcatcaactgttgtttgtccgtgcataaccgaacaaatatgtagcaacaatataacggaatgatttccattggtgtattccgtattattaggcaccctccatcataacccccttccagtcactttgctcgtttttgtttttcttgcgcttgtcagcgcccgtccacgataatgtttatgctcatctttagtgtagtgaaatgccgtataaatgtggctcggaggtctctctagccctagcccaagggtcgatcatgatatgctcggcctatcatatgcctagtcagtctaagaataattgtgtagaaactcactagttggtactgggatcgtaaatattaggattgctagtagtttcactagataaataagtgagcgaaatgggctttttgaggcgccagactctcagattcttcatataattaattcgggttgtatgataaaagctcggcgtgacataggatcagttggataagtgcgcgcgatcctatcaagtcacgtgattatgtcttatcttatctacgcagcgtagataaaccatgtgatacatcacgtgcagtattttctcgccaataattgctgtgtcagattgatttctgcctccgcatccatcatctttcatcatgcgaagaatactacaacggcttatgtggttatggacctagcagtttaatgcaatggcgaactaaatccgattgaatcggatgattttgatcctatcatggcgcagatacggcggcaacatgaggcggtggattttgagattaaaaaacgatgagcagcagtccacagatattacaggccgtcaacatggatattcgatactcggctgctgggaaggacggttcaccacagcgaaggaagcactcgatctatatctacaatcatgttcggtaccggtcatttcacatcgacaacgccgtgtttttctaaggttgaccaatgagatgctgctctgcaggtcgacattgaagttatcgtactatattatctctgtatcacccgaaaccatttcgaggactggacatagaattcgatctctggacgaggcaagtagttttacatgagaaatatgccaggacacctgtcttccacggggatgacaaccttggaatggagcagctgacgttagtgcataactacatagtctgatttaaatggtatgtagcccagaaaatgcgcctcgtacagctatctcgaggctaatcgcgctcaagcggagccaacccgctgaactcgatttagcccccgatcgatccgcattgcattgcagtcaggtccaggtaaactcggtcgggtcgactgatcaaaacctcaattgattgaagtgtcacattgcaaggagtgcgccaatatcatggcttgtactccgtgcagcgcctgataaataaatactccaccccccttgatagagtggaataggaagattaccaaattgactgagatcagactagttttgctgcaaggctagttccttagattaccgtccacctgcgtacatcttcgtgtttcagtctcacaacgaggcgatcattgcagatcaggggtctagggatccactatagtggaccaggtttattttgatcgccaatcaaggcaccacagccgcaagaatgtacaacaaatatcttgttagaatatgctgtaatatgtctaagagccgggcttgaatattgaaaccgtcttatttaaagctaacatgtgttgccaattagtatctccgctcgagaaggtccgacccattcttttttttttaatatctcccaaccatgttgttctctcgcaacggtcttctggcacctttggttgtttcgctgcttctggcaggaaatactgtcgctgatgacgcaggaacgagagcccggaatgcactccaaacccttcagggctggtataacccccaaagtggcatttgggatacctgtggctggtgggatggtgccagctgcatgaatacagttgcagatttagctgcccttgacccatcggtgatggatacagcgacatatgtcttcaataatacattccacgtggggccagtgtccaatccgaatcccggacctgagcataagactgtttacactcgtgacaaccaaccacaaacttccgtcaatgctagccagtggctggatcaagcttacgacgatgatggatggtgggcccttgcatggattgcagcatacgatgtcaccaaggaggggacgtacctagaattggccgagggaatttttgagagcttggtatgtatagtgtcagattctgtgtgtacttggacatttgttgattctttctaggctgacgcatggggcaccaactgtggtggtggcggtattccttggaatcctaccagtacatacgtgaattcgattacgaatgagctatttctctctgtcgcagcacaccttgcaaaccgagtcgccgagagaaaacagtattatgtccgctgggctcagaaggaatgggactggttcacggcccaggccttcattggtccaaacggtaccatcaatgatggccttttggacaattgtcagaacaacggagatactgtgtaggcatcatgttctctgattatctttatttttggctaacctgctgcagatggtcgtacaatcaaggagttgtcctcggtggattggttgaattgaacatagcggcacccaataacacatacctgccatctgcaaacaagattgcaaatgcagccattgagacattggccgattcgaacaatatcatccatgaattctgtgagccacaatgccttccagatggcacacaattcaagggaatttttattcgcaatctacggatgttgcagaaagcatctccacatgatatttaccggaaggtaatagataactgtgcaaatagcatttggaataatgatcgcaatgaacaaggacagttcggcgtcaactgggctggtcctattgaggcagtagtggatgcatccacacacagctcggccctcgatgccctggtcgcagctgttgctgcgttgggtacctagcgatggaatccagaaccatggatatttctttttttttttttaatattttctttcggctattctttcaagtatataattcttcgttctacatatataccaaacatcagaccagctttcacggttcaattgttttattctcgctttctagtatgactgtgctcgcttggtccagtcaggctgtggggcggcctgaggtctcgtgcatcctgactgaatgacggatgtgggaactaattccaaccttcccagtgttcaccctgtctgtcctgtgaccacactgtcaagcctcgtggttgataataccccctggaatcgggaaagccgtctgggggccaacgtggttgactaaattagatagaaattagagttggtggattccggatgaagaaccatggaaccgtgtcccatgaaccaaagggtcacatactatattttccgaattgatacccgttgacgaacagctggcatctgtaattgttgcctcgagtattttgcttagttatatcctgaatcgaattgttaaacaccacgctcattgcaatatcccatccactggggatattcaacccgaaggatactgcatagatcctaacacctgcgtgcgataagccatctgtgactgggtttgaaaattcccattttgagcttggtggattaggataatggtattcttgtctctcggcatacatgtcatcttcattcaaaggaccacgagctagatcctgatactgctcttctccaaggttgcctgtcaatttccacgagacatcggattgggcgtgacccgaaatctcatagtttaaaataccccgtgggaacttgagtgaatcagtgccaggagcccctttatcttgacccatatgatcacccagcactgagttcacatattggcttccctgcgacaaaggggatgacagcgacatgctgtggacaacagtggagtcggcgctcgacccgatccacgagccaaggaatgtattattcaaccatacagtctgtccgaatcctgcgccactagacaattcaaccaaaaattatattcttggccattggcgttaaaatggccacggtatagcaaagaccctgtgtgatatccgtagtccatggagtacagactactcggagtatccagctgttgtggactgtgtgtggagcttcgtgtacagcgcgtccaagctgagtcatcgtacaacacctggatctcagggagagaattgatgaactttcattccaggttggacaaatcaggaatgtccaacatgggaagattatacctgacagttccctggaggttcccattgggcatttttgaagtctatagtacttccccattgaaggtgatgcctttcagctttgtagctgaactaggtatgacctcgattattgttgtagcattcacatcccctgtcaggcgcaactgcttatttatcagatcagctgtgcggataagatatccggcctcgacaactaccaggctcttcgatggcgatgtgtaatttccaattggacctgatacgggcaactccagcacccagtagttgtatgcctcattccgccagagcaggtatacctgaagatctgctacccgaatgatgagtcgtgctggtgtaacatgccaccttacaacccaagcagatccgtgttgttttatttcgatgctgtctccttcgataacggttggctttacaagatgactaggcagaccaaatttgtgtgtttctctcgcgcctccgtacagaattactacacgtgtcgatcccgacccgcatgcccatgtgaatatttctgcagagtagatcagattgatcccgccgacatcgtaatctgtaacgtgaaattttgaatcacgtctattcaacgtcaggtggcctccatagttgaggaattttgatgtccccaatacttgtcaacaatgtgagagtataccatgtgttatcgactgaagtgaagtcggcatgtctgacaacgtaaagattcgtcctcgtcctatttccaagtagagcagtcacagctattgaggagggtgcgccgtaagtaccgttcactccaagatgaggagttgccgtcaaatatccgggggaactttgaggaagttagcctcgagtttttgttcactatatttctcgcgccagatcgtcctctcttctgtaatcgcttcaccgtagtcatatgatgtatgcccgcccatatagccgagattaccccagttggtgcccccgaaagtctgaggagaattccacaataggcattacaatataaaatcaagaggttgtatggacccaacatgtaaatgttgaagatcttcacgccaaaactgtagttgttcttgtacaaaactctgacagcctctttgtttaccaaccggccgcacatgtcttggaccagccctcccctataattacattagttcctttcatatggtaaaagcaagaatcgacctaccatccttcatcagaccctccttggaactcagcaatcgaaaaggcgtcgttggactctgccgtctgtgcgtgacttgccagtcatatggaaacttgtaattaggcaaaacagtaaaatttgcgcctaagggggggaatctgtcagccttacagcacgtataacattgaggtacgttggaaacaagctcacaattatagcgcaaggggtacgcatcaatagcgttgatatcgactgcgcccttccctgaccccggcgcgaagtatcccataaccaagttatcattcacaattgaaggaacagtaagaccttcatcaagcagctgctcttcaacgtataccatataattccgattcatctcagtcgggaagtcagtcactccaagccaggtggagtacttgttctctggctgaaccatgatcactgggccaccatttgtgatctgtcccctgtcaatgatccggcccagtatcgatatgtaatttgctgttgcattcaggtattcaggatcgtcggatggaataacccccttttctcgtagaacccacccaggtattccaccagcagttgtttctgcgttgatgtacggtcccggtcgagcgatgaggtataagccagcttggcttgctacgtcaaaaccccatctaagctccatatcccgtcggtgataacgtgtccaggattcccttctacaaggctccaatcaatgtagaatgagaccccggtgaagcccatactctttgttttttgacacgtcgagccaaagacctgggactgggagtcgaaggggtgaaattcgccaggaaagatcatgagccgctctccgcgtattattatagaatgttggtcccacgccacctatccctaatgcgttagtgaaatgatactatcagggtgatactattctcactagatcttgtagccccttttttttgaggtggagtatggcttttaatagacgctaaaaccaatgatgcaactgcagaaagcagagttatcaatggtgacgttttgaacaacatctttcaggggtggtaatcaaactatgagccggcagcgagcaagataatcgagcgagacaataaggcaaacggaaattccaaaatgtttctaagcttgaaatttgcatctatttccccgcattaacaaaaccgactccgcagcaagaagactgctagcattgatcctattgaagggatatttcgccaattaaccagcgcaccggtaaaactactacctgtcgatcatttcataaactacggagtagacaatgctaagtacgagacatcatcccctctatattcctgacacctaccgaaaatcaggctaaaccagattaccctaacgtaattcacatacaagccgccaccacatacgacccgccatctccaaaacatatagtaaacaccatatttgacaaccttatatcttaacaacagtgttattccctgatctaattattcctagatagcgaccgataagaatctttaactcagcatctcaatattaaggtaactaaacctctactattatggtttcaaaaattacgttgcctagagcttgaaatatcttgaaatatatatatcacgatcacaatgtcataaatcttatctaaacttagtaaagagactagatatcacctaagaagtatcgagctataagaaaaacctcttatagactaccgttgttaaaatatcaggttgtaatttatcatatttactatgtgttttggagatggcgggtcgcttgtggtggcggctcgcatgtgaattacgttagtttctggggaaattacatcagtttctggggaaattacatcatggcgagctcatttcgccatcctatcctatgcctcatttctagccactcgggatgagatttcccttcgacacctctaccgaatactaagtgccaaactcttgatccaacaatggccgcacatatcaagccactcatccttcacgcccatgccacgggcccaaacccagtcaaaatagccatggcactcgaggcgctccatgtcccattcgaagtgaagttgtgggactttagcgacaatccgaaaagtggcgtgaagggcacagaatttctcaaaatcaacgagaacgggcgcgttcctgccatcgaagatcccaacaccggtgtcgtctcgtgggaatccggggcatgcatgaactacgtccgccgtgtttatgacaatggtaatacgattggtccgtctggcgactcggctcaagatcttgtggattttgaaaagtgggagtatttcttgttgacaacgcttggccccatgacaggacaggcaacctggtttaagtcagtgactgtgaattcggaagaaatccccggttgatacttactctttatttgttcagaaactataacccacaaaagaatgatgatgcactccagcgatatacagcgcagagctatcgctgctacgatgttcttgagggtcagttgaaaaagactcacggtgaaagcattgtacccagtcgggtcactgccgttgattatcattttgagccttgggtacgcgcctcgtcctacgctggcctttcacttgacaactatcctttgatcaagaagtggctggggcttatggcgacacgggaagaagtccaggaagcatacgtcaaggttcaaggtaaaaagtgaatgagatcataccagggaaggacttaactaggactagaatcaggtagtcatgaaaaattacaaatccaaatacaaacctcaagtatgaagtaaatatcatgttgtacatttttgtctctatatatttttgatcacgaatccaaaatatcaaattttgaatgtccgatagctgcctacctttgtactccaggcaccagaacctttgggacatcaaggagatatagcaaatatgcctttccattgtgcgacttgcttggcattttgcctccacgtacgttgacctgcatagcctggtgtacaagcttaggctcaggcatctggctgtcccgctgagttctccacttcacaaactcatcctctgtcgtgtgcttcttcatgtgcttgtttttcttctcctgctcgccaaccgtaacatacggcaatggctcccgtgcagtatattcgttggtaggaggataatcatggcctgtgtataatctcgtttccggcgggaaagaaaggaggcgtttcatcgagcggtaaagttcccgaggatcgccacctgggaagtcacatcggccactgccaacatctggattgaacatacagtctccggtgaaaatattgctcccgaatttgtagccgccgtggtctggagtatgtcccgggagatggagggcgctgctggtgacttggccaatctggaatatttcatcgggctggaagaggtggtcgaaggcgttgtcgatatctgctttcgcgattgcatattttcgtgcgaaaaaactttggacgatcttgacattctcaccgatgcagatcggtgcgtgaggttccccgcgggaccagagaatttgttggatatagtaggctgctgagaggtggtctgcatgggcatgtgtctctagcaacatcatgatagtgtattcatttttcatagcataatcaatgatttgatccgcagattcagaggtaatagcgaagttcacagtatcataatccaggactgggtcgatgatggcagcttcctttgtttcaggacaagctactagatactgccaagagcaagtcttaggctcgaagaaagggtgaactctcggttccactgtgttggccatcttgaagatcacttgcagaatatgctttcaagttgaaaagtaattaaagttggtgtttcctcgagtacgagcctggctggttggaattacgtatttatagaatcatcagtgccacccagcatagatctagccttaccctacctcaaatccagacagatgggctcagcaatccattaagtgtccatgtttttattctcattgtaacttcctatggggttcatgctctcaagtcttttgggtgatgttttcattttcctccgtgccaggacagcgtattacttcagtcaaaatacagactcaaacatacacccctagaatgatatattccgtgactgcgactatatagctatgaaacaaaagaggatatgattaaccacccccatgtattccatgggactcgtcaagtgactatgagaaccacgacttcgggaacattcacgagaaagcccggttcgctatttggtacagacctacaggacttcaataacttcttatgttgatgcactgccactggtaggtaagttagcaggtgctacgggaccctcctcttacgctatctcatggtgcctatagggagatggtggccagggggatgagaggcaggagtccttttataccccaaacccacgtgccttcctacagtgcccaggtgccttgcaccttccctaagcaacagacatccaaggttggaaagattcttgctgagtcagaattatatgattccaaccttccaagttctacctttccgtttgggcacgaagagaaattaaccagattaaggagattaacggcaggaacagtgagaataagactttggtgcctcttagccgtatctaccgtatgagtttacagtctacgaaaatagaccaccgactgcttctggtttcaagggaataaacttcaattgataaatgactgtattcaaatttctttctaacccattgaaatctctttcttacatctgtctgtttagtgctaaccattgacccattgttttgtcaagcgaccgtccttgcagtcgcagacatttcacgcatacaaagacatcccaggtaggagagattgtctgtaggtatggaatgcaaattttcttcgcggattctccattagaaagcgaaaccactaaaaccgataggcgacgatcgtttcccgatagaaccgtcgctgacagaccattgatcaatttcgctctggtcacttggtacgtcccatcgagcggtttgaagatcaagagtgtgagcggcttgattgaatcggcactgccagctcttcacggccttgcatccgggcttttggcataggtggcccatgtagcatttgattgatcggcaagcgccgccccgagtgcaggggtgctggaggagcatgtatcgcagaacctcaatgatcacttcagagacatcgctgtggtcataggtacagctcatgtcaccgcactctcccgacagatggtagctattacaaactttgtgttcttttgctcgagcgtggtactgatcaaaggcttcaggcgacgggtgaggatagtatgggtcgatacggtccccgtctttattgactgggatgaattcttccgttttgatactcggcaaggggagcatggacctaaagaaatcttcggagcgcccgacaactgtaggggaagaccacagttgtttaggtgaatcacctgcacctgagtgtttaggcgacggctgatgattcaatgactggttcggcataacgtgctgtttattgcagccgatgccgaacttgcagataccctagataaatgtcaattaagaacttactcgcgactgacatcatgtgatcaggaaaaataccttttggaagtgcttgcagattggtttggtggtatttgcaccattagcaccatttgtgccattagatacgtagtgtgcactgttttcaccgttgaatttggccacagtcggagacgcagccgggcctgtaggtggcttgctgttaagtagaggggtagacatgaaaaccgaaggtaattctctgatagggagatccaagtcctcgaattcacgatggaaaccagcggctttgatgagggtgatacggtcacctctgcctctatatggcgtcagcagggagccgtatccagtgtcgtggcagccagcaaaatagatatggcggcattggttgagttcaacgaagagacggaacatttcttgatttcacagcacacatcagtacaacaacaagattgttcatgccggattgttcattacctctgatcttgaaatcactgccttccttcttctctgcagcatcgacataatcaaatagctcttgtgcacgggtaaatgatgaagtaaatggtgacatggatcgagcctcgtggcccataagtccagctcgagctaacgccttcgacaaaccgagaacgttcgcatagacacgaaccatgatccgacactgttcggcctgcattcccattgtcgaatgcataagctcttttatagagtcgctcagttcgcgggcagcatttatgccaccttcgctgccatgcttcaagaaatgttctttgaactagaagatgtgttagtcgatggatttgataccgaggaaagcaagacagtctcaccagatatccgtctccatctacaaggacaaggacaaaagggttacgatcctgattgattgtcagtttcaagctctatggcatcctgtaagcctgcctcctacctgccctctggcctgtcttttgtatttctctcggccttctttaacctcttcatagtcacttttgagcgagctatagtcgtctaacagactcttgaattggctgagcaagtcctgcagattgtcatgctgcttttgctgctctcgcgataaggacagtagatgcccattcaaggaatctatatcagaatccctcagcatcttgtcggaggtaccgggacggcatgtgccagtcccataagccaagttaattcaacgaaggctgcgagcattcgattgaaatttgaaagaagaacgattttctaaactgtgaggtgcgctggacagctatggtggggaaatttgtttggcttgttgggcggtcaatggcccctaggtatcaggtgacccctggcggaaagtacaagacgttagttgtgtcacgtgcaagacttccccataaacattccaaaagtggactagcgttaacgcgacccgcgttcagcctagtggtctcgctcctatccaagttgcaaaccacatccaacgtatacaacgcatgagcacgaaaaagcgaggagctactcgatctagctacgcatggaatagatatgacgactatctcccgtcatattgcggttatttctcgtttatcttaagggattttggttttggaggctaagagtcactaggtcgatcacctgtctaaagctctggcaaagagtatgaggtagcatgccgagacagcattaatcctgtatcgctttatagtagctctaatttgtctgaagtactgtggtctccatacattgtatcaccagggagtagctcctgtatagttatgaaacacttactctgcttattacaaacagacccaaccaccatgtctaagtaacaaaccaaaactagacctattgatttggaataatcttcaatgtaaggatttgctcctaggaatacatttttttgaccgcacgataccatcctcgggccttgcttctgctcgggtgcgggcagtgaacgggtttcagacaactagtatagccaaaaaaaccacaatagtacgtggtgatgagaaattacattgcaaatactctgcactaacaaggggactcgtttaaaataggttaataataacggtgattgaagtggtttccagcgggaaccattcattattaatttatttagggaatagagaaagaaggaaaaaaagaacacatgaaaaaggaaaaaggagatgatagaagagacacaagaatatcaatctcttgggagacctcttcgtggtatgcatacacatcatgtgacctcaaccccagcgccagacatcttaggctcctttgttcctttttcccgtattccccttttctgcttttgttttttttccctgaacgtctgtcgggacttgattatccaggtcccaggcgattccccattcttctaatcatggcggttccatgcaatatccggggttcggcttcccagctcttctatcaagaccaacaatgtcctcaatatcaagcccttttggctatcaccgagatgccgcatccagatcgttctattgtgggcgcttttctcatggatgcacgaaatccccaggaagcagcccgctacttcttacgagagaccgcaatcgatggcacctcgcactccgtcccagcaaggacaatttcggaattcctctcagattggaaatatttggtcagcatgtgtaagcatgtcatagttatatccaaacaagtttatcttgcttctattcctgacttgcgatcgtgtagttcggcctattgtagcaacagggctgtccgctgagacccagcggctggtgtatgaaagagacggcgggcgctgttgcctcacacaaacacaattcaagtcaccggaggattctgacctgcactttgtacacatcgttccaccacgggtgttgatgcatccggatttagtcgagggggtaagtatattcattccatatcatgcggtctttgttgacactagcacacaaggctcgcctatttgagatgctttacgcttttctgtccaatgattccatgcagtcgcttcggtcgatccttcccttgaactcgtcaatggagagacttgataatctctggctgttgtcggtctccgcattcgagcttgtagaggccggcgaggtatggcttaagatccggagctgggacccgcaaaattcaccctacagaaagagtgtagatcgccatcaagccctttatacgagtgcacgctgatttaagactaagtatagcatcaacaccaacctgtacaggtacaaaactcggagtgaaatgtccattgctccatcagcaaagatgttgcttcttgatgataaaaccaccgataaaactcctatcccccacgaagctctttttgagcttcatgccctattttccaagtcactggcatggatggagacacggaggcacatgatagaacaacgggatgctcccagtaggtttggacctcgcttttcctgatcatttctaatagctttcaggtgcaaacatgtttcggttctcattgttgcctacgctgttatttcgcaccatcagacgaatatggaccaccctgccatattttattcgatatagagcgtatgaaaagctccattcggttggcttatacctctatggacaatccctttctccaagagtccaacggctgcctttcgggctgtatttacgcaagggacgaccgcaacaggcagttcaataccgggcagaggctcatactcttggcatggtggagaaattcactcaaatacctgcgccaagagcaattgatatcttggaaacccctaatgcttcatatttgctcatgacccaagtcccaggccgtccgatcggccagctgctcaatactatgacggacaagcaagtggaaaacgtggtgaccgacctaaagcggtacgtcgcccagctgcgagcgatccctaacgaagtcagcaaatttcaaatctgtaactctcaaggtggcgggatcctggactggcgcatccctgatagccagtcagaggaattgcgcttccaaacagagaccgactttcacgactatctgactagaattatgacggaagatactcgaaggcatgcggccaaatcgcatgccaccccacacgcgatcgtatttacgcatggagatctaaatcctaggaacattctcgctgagaacggcaagattaccggcatcgtcgattgggagaatgcgggcttttttccagagtactgggagtacactaagatgcattacacagttcgcagcttgactcgatggctggttgatgtcgttgatcgagtatttgagggctaccgggacgagctacatgtggagaatatgctatcagatttatcaggccccttttaagcccaaattatatcatataggctttctagataggataaagcagaacttcatttatgtttgggatgtatgtaaagttcactatgtggcagtatcatggctcctcttgctctcgccttctttgatcttatttgcatcgtctttggaatatctttcgactcggttactgaacggccctctcatgaagacaacccagtagtgatgaatcaaatatccaaaatgaattcaatccaatccgttattgtcgacctcagcattgtccgcacctccctctacctcatccttgtgcgaatagccccgttcgagtaactgggcttcgatcacagagatatcacgcggaagtacgattattccattcttgtggagctccacaagtgcatccttcacccagattcggcaggaaaatggctctccggtgtttggagagtgagagtagtcgaagggaaatgcgtctaggatacttttgcaggcttcgaatgcgctagtgctgagggaggcgagcttaaaagccaggacaaggctcatggagaagggaacgtcactggacgatcggggcgtgacgttccagccgccgcttcgattggtcgcgtgtcacacatctcccactggagtgttggtcgggatgaacaacccccagtggaagcccggggcagcgcctcgactgctgagcaagacatatagtgaatagttctcatacagacccgcaatctcggagcttggtcgaagaggcatcttggcggacgaaggcagatgtgcactagtaacgtggatagtgcggatcgtaaaaagtgtggacagaaaacttcagatgtggaaataagggaagtttcgggggggatggagaatgctgggaggagtaaggagataggaaagatccagaaatcatgtatattttatacacggaagggaggctctgcccaggagtcggcttgttgcctagctcatgccagcgcacgatatgcgtgcatgcatacggtgagtggtatgataggcaagtgagagtgatgtgatggacagtcaacatacactaagcgctaagtgcctcgattgaaaccaagggctgcccagtggcctatagagagagtatttcaaagaggggtaatgcacccccctgttaagttattgagaacacgaccaacctgcttgttggtcatgttgataccggcagtgaaatgaataccaaagggtgtatttacttcataaaatacacgtataccctcagtacaaacttgcgacaacttagcatgttagagacgcttcgaaggcaatcgtttgatatgggttgcccatacggctcttcgacttatattccagctatttgtgttagtatatagcactcataattcaagcctaggaacccaaccttggaaggttcccagtctacaaataagacatttaatgagaccggctgaaacgaggtatcaaggcgaaccgattgggaagccatggggtaattttctataggaccgggaaccctcctgcgccacatggtgatttaggattcttgattatttcacccactgtgatgtaaaatcctggggctagtaatgtgggattatttgcgggactaaaagcatagccttggggggtgtacatagggcttgcaaagtgactgggtggactacatagccaagtccttcatgttttctgataactagaaacagtatagttcggtcatcagccagtgcaagctatgtagatcttataattccgcagcgattcgttcaaactcaaatctcatctcaatattgccaaaaaccctagctacaaggaaaacaccacctccaatcaatgtgatttacacatcaatcggagccttgactagttcaagtcttacgtcgttatgtatgataaggtttccaagtacaattacgtcctaaaatggtttgtccgatttataatcaactttggttttgctttcaacactattgctttccgctaaatctctttcaagaattcaattgtcatggagacaaccttgaatcggtgggaaagacttctgtacatatctgagcatgtccatgactccttgctgcaacatcccaagccgcttggacttcacttgacacgccgtactttgatggcctcatccatgctgctgtgcctgaagttgcctcgtatctagataatactcggttgctggtgggcgggatctgtcaacatcaaggtcctcggatttcttacatttaagatcgtctagaccctaaccgatgaggcgcttaaagtcaaggagtataaagataacgagaagcaccgtcgcgggggggccgaggccggtaagaacctcaagaagcggaagcgcgagaccggtctattcgacccaggggcgtactcccattgagcagcacattcgtgaggcctaccgcaagctataggctactctacagaaggccgtggctatgctgttgcataatggtcgggttcctcaccgcattcctcttgcgttggtgagtatataaatcttctctgtatattcttatgctaacaatgccaagatttgaatcttcggaattgacgccgcttcatgaattacgcgaacggtagcaggagtttgcggacgatacccaactttgtcttgttttatttgagtttattttgtttggtttaatgcaagcgtctgaagttgacttgtagaaattcgggattgttaatgggacccctcatgcctgaattttgacagcgaaatgcacccattctgctaccgccttcccagttaactacaccgccctcctaatttgtaataccgctcgttctccctcgtttttaactggcgaatatttgacttgcagaatatggggtacagcaggtacctacaatttgtatatgaacccttaacaatatcaagtcacttttctagaggatggcgacagcgaggttctctaagtagaagatttacagtattgaatcagctaggataagcacttttctgtaagcatagaggtatatcttttactatgtaaaccagaagtaggcagaatacatggcagaaaagataaaatgtggcagaaatgtagcagaattatgagtggtactagatcaggaaggcggtattggaaattaggtaatttgggggcggaaggacgggaaataactccgccttcccctgtcccaacctcagaaagtctcatccaatcacgtcacacgaaccattcccgtttggctgcatcatcatgaccctgccatccgtcgttagtgatcacgatgattctgatttcgttctcccaccccagacagataaaggcaagaccgagacaagcatgtccttcacttccctcatgtctgctcttcccacggactgtatcatacggaacttttcacgcttcaagggcctacggcttgaagctaagcagttactaaagtctctacaagagaagggagatggaaaccagttcatcgttgtcctcaatctatcggccctaacaatcaaaaagctcgacgaagagcatcagactagtctggggggcattgagtatcgtttccaatgggaggggacgacagggctgattaaagtggttccgtcagaacgccatgatgcagtgacaaaccaactcggtcgagcaatcgacatgaagcttactgcaatgggactaaggtggtcagagatgatctggactggaacagctacatacaagcctactgtcggtgtaggtaaacagggagatcacgcattcctaccaccaattcgctgccccaatgggcttccaagtgggtcatggccgacctttgtcatcgagacaggagtttctgaatctctccctcggctccgcgaagacgctaagagatggttcataatttcccagggtctggtgcgcattgtcattcttatctcgattaaggcgactgaagtcacgtttgaaaaatggcagctagccccccccggtgccccatccccactcactcgagcatatcttgattcactccgcgcgcagctcgtcaatatccctccacttaccaaccaaccgactcccacccagcaggcatactcagcgcaggaggtctacgtccggcgcaacaatgttgtcggggcccccttatgtcttccatttgtcgctgtttacgaccgacttccaggaccaggagaacatgatctccttctcaacgtcaatgatttcctcgaaatcactagaatcttattctgatatgttctagtttgctctcggctcactgcccatcgtccccagatgcctctattctgttatggtctgctatcgggctccctgcccatcttcccccatattcttcttcgattttccgtgtattctttgagatagctctacaaaggactgtaccactattgacctataatctatcccatttatcagggatctagtacgtacattttccttaacgatccgagctagtatcacgttgagcttctcgaggtcgaagtacaacagtctaccctagaaagattcacccacttccacagtggatttactagcgtatagatcaacatggtatttaatatggtattttactactcatactaaattactgcactttttttaaaaaataaatacagtgatctcaatttctcaactttctcaacactccatttctgactatttaacacctacctattatcatgtctgcccactcaccggaatcttcatattagatgagaattactgatcaatttagcccgaccatatttggcctcatcgttcagggtctcaaggtctttctgtattcacatctgaaattatgtccaagggcgttcaatttgtgcaagcattcatacatcacaaggacacagaccgcttcttatccgccatgatttcataaatcgcgtcgatgtaagccttggcgttggcgttgcccatggcccctggtcccattttgttcatggcataaccaatagtcatgcggcgatctagatccatgaccatcatcgatccacccaaacctcgccagaagcaaatgtttccttcggggataaaggtgataacctccggcagggcgactccaagcccaaatctgatgttgaggtacaacaccatatcgaacaccgctaatccgctcctggagcatctggtcgatagtctttagtccaagatactgcttcccatcgacagtgcctctcagtgacacacttgggtactcccaactcctgtactagatcgtacttagtcgttggctcacccaacctaatagaaaccatgcgatcctctccgtatcacactatgaaacagcatcgctagttagtgcttggccattttcattgctttgtcatccaggatgtttgcccggcggatgattaccccggatgtggccatgattaccagtacctgataagagacctcctcctgtacaaataaccacttttttatcgagagtatagttgctttcaaatatatggataatctctggcttctgcttggacaattgacgtgacgtcgctcaagtatccttgctacacacttaactatgtgggcaggctagtttcatatgcgacctacgtaattatatggacggtccgctctggattctaagagcgccaggatgaataaatacaggctgattccatatttgtgaatcatgttggttttgttgattatctctaactatcaaatacttcagaatatcgtcatacccgaaccaactatatatatcacggaaacccgcgagagaaagccatatatcaaggctgtaaaagggaacaaggaagctgggataattgtcgagaagagctacattaccagcaagcagctcccagcagccatggaaagccctggtgttgcgcgacctaacgcagcggtatctttgggaaaccttgagggtgaccttgaatgggccaggaaatgtgacggttgtatatatatgagtataatgcccttaagatccatcacccttgtgctaaattgtagaatgctctgtcctcggtggcaagaaaaacaaagagaagagacacaagactcctcccatctagtaggcgaggctggtcattgcaaggtcttccacgttggtgcttctactcggggcaagttcatcacagtcttcaaaatctccgaggatcttatcgattacctctgcctggccactcacatgtagaaagtttccaatggaagcgtggatttggagaagtctaggatctggaagttcccaacttccgttatgaactccgaaattaataatccgattttcaggtaagagacggcttgtctttataacggtatccggaaaggtcttaattcgatatcgttgaggagttccagtttcctcgaaaataagtctgaaatgaccgaattccttatgaatgtcgttatctagcatcatgatattattctccgaattgatctgttccgaggtaaagcacatattgcgaagaactgggaagtagcgccttaggttaacccaaatcgctgtatttctgtgtcggtgattggcttgaaaagatccgagtgcaaatggaataatataggccgcttcaagataggtcgttactgcgttccgtggataggcgtgagcgtgactatacagccccgttgcaagacatttattaccatctctttctaaacagcggttccagagttgcgactgagagctaagatcctcaattgaatcttcaacgccagaatgcggagacagagtgacctcagtgggtattttaccaccctgttctttcaatggaatcaataagccggttttaatgctttggactagttgccgaagcttctcatcgtttgaacactctaaaatgtccacctccagattttcttttccgccaggaggaaggatctcgaggaagtcaccgaggaagtcctttgttttgtctgtaggttcaagtagtacgtagctgttcaactttcgatccagcctctggcttggttatgagtatcaaaaagactacctagaaggcataagcggacttaccgtctgggatgatgacatcactattggcacagtggtctaatctaattaggacaggtcaatcttgttgtgctaatgctgatgatttatagtcgtcccttgagcagtgaattctcttctgagatcgcgatggctgtgacgtgccaggtcttacaaagatagaagagtgcatcaattcaaaataacttagagagagagagagaagaagcaagttgcaaagtgggaagcggcctgcttatatggttgacctttgcaaacaatgcaaacaaagcaaacttcaaactctcgcttagcactaaatttggttctgcgaggtgctgcagcacttgtcaaggcctggtatattatctaggctttgaacttttcttttcgataattatgaacgtcaacttctcctactctatacgcttagtatattggtgaatgcccgagggccgttttataccccaactctatgaaaatttgttctcgaaaggagaaagtgatggagatggaactcagtcatttcgcgagtttttccagctaatgcatggttacaggtgcgccgctgatcctttcggggtaagtcttcaatatggatggtaaatctcgactgcacatacgaaagactttgggtggtattaagcaatacattcattttgtggcatgtagaacaccaccgaaagacagcaggtgtagataggaagtcaataaatacatagaaaaaggtatacaaaatgaacatatctggtataatgccgtgcgaattaaaaatataaccaaccacagtgcaactggcttccttcatcctcgaaatatttaggctgctttagcagtaggttcatgacctttctcaagtgccacccgttcctccgacgcggaagagaaagacacagcctcaccgggagtaacccgctgcgccgcatactcctcatccggtttccagaagtccttctttccatgaacggcacggttaacccagggtggaaggaagccaccctggagcttccaggaccaaggatcggactcttccttgttaggcgggacaatgcgaccaaaggtgactttctcaagacaccaggcaatgccgttcagggtgatgtagctggtgataccggcgatcagaccgtaggcaatgctgtatgtgaacggcatgatagcgatggtgaggaaggcggggatcgcatcaccgtagtagcgccagttgatatcggcggcagactgggccatcatcgcaccgacaatcacgagcgtacaacccgtggcccaaggtggaatggaagcgaaaatcggagcgaagaatatagcgatgaagaacgcaatgccggtgacgcatgatgtcagacctgttttgccgccctcggaaataccggcgccggactcgacgaatgctgtgacggggggactgccgagaagggatccgatggagatggaaatagcgtcgaccatgtaggcaatggcgctgccctcgaagtcttgggtctcctcgttgattgcgccagcgaatcgggccatggagtacattgttcctgtggtgtccagaatatcgacatactgccgagatgttagtcttcaacctctgcgtgtatatagagcttgcgacataccaagaatgtgatgaaagccagtccaaacttgccacccttgccggccaagttccagtcctgagcgacaagaatacgtttgataggatggaaagtgacaacttgcttgaagaaatcaaacctgctggttccgagctcagtgtaggggaagtaagtgacgggcgtagtgcgaggccacgagatgatagaaaccaacaagatacccataatgacagcacccttgatgcggtacatcatgagcatgaccgtcataataccgccgcagaagatgccaacccacatagtaggactgcgcatcttagtgctgctcagacacaagcccgtatcggggtcgtaattggcggggaagtccgcacatccagccaactcaatgggagtgtcagtgccaccctgaaccattccaataccagcactgtaggtcagaccgatcaatgcgaggtagagtccgatgccgacaccggtcgcgagtttgatagactttggcagggcgcgcgccagccactggcgcataccgatcaacgtcaagcccaagaatacccatccttccacgaagacggcgagaagggcagtcgagtacgggaccatgccgctaccacggactccaacaacggtgtaagcgaagtaagcgttcagacccattccaggcgcgagcgcaataggcaggttggcgaagaaacccatgcagaaagtcgagagacaggcgatggcggcggtggcggtgatgaggtcgcgattgacttcttgcgtgcacagagcgtactcgacattagttgcgcagaaatctttcatgtcttcctcggggcagacgcaggttccaccggtcagagaggtgatattgctgttgacggagatgatgtatgccatggcgaaaaatgtggcgaggccggcgcggatttcagtgaagaagtaactacccttcctttctctaggctgaggcatggtttaatatcacattcaatattactgcgatcgccgatcacatagaatgcggtatcacttacatggccagagccctccagacgaaaccatgtccccacgggactgcgagcaactcgcacgttggttttgtgaacccagttagcgaagcccattgtgaaagagtatcacgatcgtgtgtggtggagacagcgaattccggggatgctgtcgtctttaagacgcagtatttaaagatgttcccgcagtggaggtgtgcaggatatagggtccaagggagaaatagggcaaatctcaatgtgctctcttggccaaccacaagctgctgataagaagtcagcaaaaaaaattagtttcgcctccaaatacagttatctccggggtttatgccttggtggggtcgtgtttcacccgtaacctgccgtctggccgtcctcattggctataccgttgccgacagggttttgttcaacccttcgaaggttgtctgtgaacgaagaactcgacaaccaggtgatgaaaaaaagggtccggacattatttcaagtccctgcaaatccaacgtgtccgaatcaacccttggaacatccaaaaacgatctccatgtgctttcacaaatgttgcacatgaacattcctgcaatgccaagacgcccgcaatgccaagacgccggcgcgctcagccctcgtgagctgtctatcttatcgattttctgtgtgtcgtgttacttggaaagatgcagggttctcgataacggaggaagccgatgaccttaataaggaccatccatccaatatccccagtctcttggctgtgggatatccggcggccatatccgatcgtgggccatcacggaatctcacccgcagatatcggatgcgttcggtctggcacgaataagccttcatccatctgatttacatctcggtacgggatacagattggcatttgctggcacggatgtgctctgccaggagaaacaaggggttgcgtcagactaaaccgatccgctccgccacgtgaaccacgaggcaccagaaagtcaattcttctggatatctcgtgctgatctcttggatacatgcggaggacggcgcacggcgtatagacagtgcacagcagacagattatcttcgcgtagtatccacgcgtcgtcaccgttgctatcgcacagggcacgtgctggaagtaatcatgaagtcgcctcaactaggatttattcgagcagtctcttacatagagctatcgcagcatctttgccatccattatgcgccgcctaaagaagatgcacgacgtttacaagttgaaacataccgtgccgagggctatcgtccaatgcatcatgttccaccatcggtatcaacccactgggaaatggaaccacgcaatcttttcaaccttgccaatatactatcctctgtggagtgtgacgtgattcttaatctattcacgcctcccgaatgctgccatgtctgttggctccctggacttggactgacaagtgctcctgagtatctgatggtgtttcaaagcccccgtggcctgctagacgatgccgaccttccagcattgattctcaagatttatgatttaggtggaggtactggatttatttttagacataaaactcccaaggctaagacgctcaatggccgtccaaatggccccaattcctctgatcccgtcacttggcctagagtcaaaatcgatatctggtctttggacttggtacattgtctccttactccacactttctggattactattctcaactgacgtatgccaagttattccactttgccacaaatgaaatactctttggcctgggtgtatatctaccgaattaaacggaggtttgagacctctcatgttcaacttcgttcagagtgagagtgaccatatcacagtttatttggatgaaagactgcggcctgaattttgcgtagacaatccagagaaattgtcgactttcctttggtcaatgcaaccaaacccacaggattgcaacctatggccggccttctacggagtacttcatccattcaaaggagtgacccacatgagacacttcaataattgaaggttacaatttttaaaattctatggatttcattattagcaacagggaaattttatgtatgaaaatgcaaacgtaaaggtcgcgcctaaacagactctgttttctccgaccttgatggaagaggacgctcgaagactggagcgaacttagatctcttgcgcaacgcaggtccatatttgatgaatagcaagggaatcgggatcatgatgagtgccagacacccaagaagtgtgccggcccactgcacacccaagttgatgaacatctgcttcgagaacagggggaatgcagctcccaccgccgatcgaatgatagtattcgcagcaaagacagatgcggcactatttcatagtcagtacattgttccacgaaaaaaaaaaaaaaagtaaaaaaccagcatgcttacaatgtcaaatatgagtcaatcaagtaattgaagcattgcaggaagatgacataaatgccgaatccagtcatgattccgctggctgtgggagccatccaatggattgactttgtccatccagtccagccataccagaagagcccgatacaaaagcaaatacctccaaggatggcaggaggaagtctccattccggaatgggcatgtcattgttggcagccaactttttggtatatgccctctgatcataaaggagataggccccagctagaaactcgccaataatcaatccgatgaatggaagacttccaacaccgagattcattccgtggattccttggaatacaacggggtacgcaccgagaagcgcgtacatcaggccatatacaaagctcatccagagagagatctgaggtaaggttagtttggactggcttgagagattcacgcacaacttaccagaaaaacaattggctcggtgaaaagcatgcggaatggccgactgaaattgttcgtgatcagatcgccccaatcgagctcgatctcttcttgtctcgcgcggattccccaattgtgtgtctgccgtcgcaggatgacggctttctccacaaggacagcgggtgcataggtctctttcaagaaaagaagacaaagaccagtggccagccatcccatgaaggaggagatgtacatcgtccaccgccatcccagataagacatggtgatgaagccaccagtgaatggagacgcgaatggtcccacgaacacagccatggcgaacatagcaatagcgacaccacgcgtctggttattccaaatatcggcgtacacggccggaacaatagcgatcgggctagcagagaaaaagccagcaaagaatcgcgatatcatcaaagtctggacgtccttgctggtcgctgccgcaatggagaaaatggagtacccgaacataccaacgcagatcggccatcgtctcccgatgagctcacttgccggtgcccataccgttgggcccgaagcaaatcccagaacgtatagcgtcacaccgagcacagcgacttccgtgctgatgtgaaagtgagcactgacatgtccgaccgtggaggagaagatggcactggcgaaagacgaaacgaatgttgtatatgctagggtcactgatataccgattttgcttgcgagggaccagttctgggggtgcataggatcgtctgcatcgttgaattcgacgacgtattgttccgggtctgggagtgatggaggatgaggcttcccagctccgagggggagccactggtcacgcggtgtgattcctatgccggagccaacagttgagcgttgttggagtcgataagtattgattcgctctagctcgacttcgttgggattgctttggcgatgagtgaggcctcctgagggcatgggcccagcttccgacagacggcgatcatcaatcgtcgggatggtactgaggtcatcacttccactactgatagaatcatgtgggctgtgactccgatgagacatgctgaaatgctgaaggatacaaaatgcaattggattttagagacgaattttatctaggaaatgagcataatatatatgggaatcgaccaagctaaagatttggaacatctggttcccagggatcggacggccattttcatcactttgatggtaacagacggcgtcatcgagtgtagcttccccggttgatccgtccaaagtgcgacggcagtttgcagagcggtgtactatcagtcccaacacggcaatatgctccgagccccggtcgcgaaccacggtacgatctagacatcggaagtctattcggcacttaggaacaagatccaagatggggtatcataatagccactgtataccgacgggactattagcagtagactgggagagtctgagagtcagtgaagggtcggggaaaccaccgacagcgaccctactactagtacagatcttaaagtatagcatcaccaagaagtcaacaataaaggtgcccatttgtacagagtaatatctggtcattcacatttgtgggctttgtgcgatcattgcgagtgtccgagctttgaatgtgtgtggatatatcttcgggtatgaaaggatttgagtaaactcggggccttagatagcgacaatatagaatgaagggggttgacaatcaatgcttcaggttgacataaatatggcgatgacggtttcgaaattgtcatggcagctatttcaactacatgtagtaccgatactccgtaccccggctttcgttcaagtctctgaacccttaattctaaaaaaagaatcgcagaggaaacagctatctcccaaggcagggacaatttcttccaaatacatgtgggctggaaaaagaaattataatagaaacacaacgaatacaaaacttatactccgtatagcataagaagaaactggtttatgtctgatgaaatgattttcagttccactagggttagagtggggcggagcttgcctgttcttttcaagctctcaccaagcaagcctatctacccttggaactgccctaaaaatgtgatgcatcatatacagttgagtacgaagctgcatgattgtctatcctatgacttgacggatcggcgagtatctgctgtttgtttcatgagattattggctagttaactacgcgagatattcaatgtttgcaaaggggcagctatcaataggcagcttcccactttgcaacttgcggcttctttctctccaagttattctatattgaatgcactcttctatcttcgcaagacctggcacgtcacattaaatctatttgcttgatttgttcatcaatcttgaacattacccagcaaatcaagtgcctcttctgcaataagacgactagagggtaaaaatcgcattaatccttggattatatggagtagaggtttgagtgttggatcgggtaaaccagcaaactcccgttcaagcttcgaggttccgtaatcttcgaacaaaattagcaacagttctgtatatggatcaatttacttaccatcttctagctccagattatgtctagaattcctcagcattgattcccacttagacttccattcagccaccaacttctccacgaagccaatcatctggtaaattaaaatttcgtcctcgccaagataccagaatggccaagtcgtgaagaagaaggaataaatctacaattcgcggtaagtatatttccttcaaagaaatgatatgttaacttaccatgcaacctatgcgctataagtcgacgcgataatcaaagtggtcagtgaatatcgtctcgggtaccctcaatgaagccggctaggccagcttctgttcctatccttgataagaactctcgccgaaattgaggagccgaatatcttcatcgtcctcgtctatccactcagtccattctgctgccttgatcagttgggccggcaattcattacctagaggtgtgctattaacacgttttagcggctcaatttatgaatacaactaaatgcaatattctgactactgatatctaatagtatatgagtaaaaaggccaactatagaaagctcccttacctcgatggcatataccggcactgtgaatgaatttgatagcttttggaagctgcgtagaaattcagagcacagtttccgggtcgagtttatcgtgagcctgatggtagtccgagagaaccttaccaactgaaggccaagtaattcaaaaacaagacattggtgggtcccgttagggcctatatgtataaaggcatcaagcagctgaacaatatagtttgcagaaagccctttccgacattgcctctctagaaatttcaaaatgtgtagctctcgcgatatcgacgaatttgcggtcatgattttcaaggagacccattgatttcggctggcgtgagattagctagaaatgaatacagttgctagccccatcttaccgccccatacctggatgggggcggtaataccatcatcccaccttgtcagggaggcacataagacggctacaggataaaccgactctctgtctttcgcaagccatactgtggaaaagccaccctatcctaacttgtgatgtatcttctaacgatcattttcaaatgtatctccgaggttgactggatggtatcccccaggctgatattttgacaatgactcttgtgtataaagaaggttactttggcagaacagagatagatccatcctagaacgcaaagcggatgagagcagggaggcgtttgcgatgagaagttgcgatacattcagggtaaatttcgctgccaagttggatgactaaccaccctgggtgttcttgaattctactgtacgtgctttgacgaacagagtgagatcttgtccctcatcatattgtgatattgtacaaatccagttagcccctgtctagtgtcatgctcgatacctgatttcccttgcgccaaggcccgggtaactgtactgtgtgacaagggctgaatggatcgacgagttgaggccccggttttaggggctggttatgaggctcatacccaatcaactacatttaagcgctgaaggatcagtaaatggcaatcatggccaaatggcaattttagcctcgcatgactcagacaggattccggagcccatttgcgaatcgtctaatattgctttgcgctcacgagagtctagatccttcacgcccgctttaaaaacaaacacttatttctcctgcatgaggggctgtgtactctgtaacccgtaacgcataaattaataactccccgccatatcgctgctaggagatttttgacttgagaaccccctcaaactccccgagatgaggcaatcgaaaagcgccccctacggagctttaccaggcgaggaaaattactcgagaacatcagaattccaatcttatacggcaatcgaactccctgagatcgacgaccagaaatatcgaccccaaccccaacccctcaaggtctctcagttggatagaatttctcgtctattatgggacttgactcttgccattgtcgccttgctcttcacggtgttcggtatatgggtttcttgtatcgatggaaaaccggcgggcccggactccatgggctccaaactatttgaagtctctcaatatgttagttgccccaatcctacgctcgtcctcaagatcgtcaaatctagctgacaccgcatttcctcccaaaggcacccactgtattcccagtccttttcgccgctattgccggtagcagcatcaaaagtattgcatcgtggcgcatccagaccactggaggagcgacgatcgggctagtagagcaatgtctcggcagccagaatatcacaggagccattctcacccagatcaggctgcgcgcggtaaactttgtcgccgtctttactattctactatggtgcctgtctccgctgggcagtcaagcatctctccgggtgatttcaattgtcccgagttacccaggtaatccggtcgagttgaccactttaagcacttttactccgtaccagtacggctaccaccaaatggcaacggaagccataacatcggtcgctaaccccatgactgcctccttggctgcgggtaggatacttgcgacccgcaaccaagatctctggggtaacatccgccctcctgtgattgagaatctcgagacaaacagtacgggttggatgaatgcaccccaaaacgacaacttgacgtacgcgtctcttgtcggcatgccggtgattggcttaccaggctccggcaacacatcatttaccctctcaggctcgtatctatccgtgtcctgtcctgtcttcgacacaatccacactttgaatttcaccaatttcaccgggtcaagtgctccatcccccggtaatggcgacgattgtagctggacgagcgcatggggtggataccagtttatgattgccatctcggagccatgttcgtactcactcaacgcatcaatgacaaggactcggaatgcccgtaaactggtatgggaatcatgggatcgcggttacgcaggtgctatcgatgatagatcccccataacacgagccatatgcgacattacgacgacctatgtcgattccaacgtgacatgcgagagctcaggcggaattcagtctacaaacacttgcaacctgtcctccgttcgccggtcggtggatgaatcacatttccacaaaaactggactgtcttcgatctcaatttgccaggtgatcccgagctaccgaaaagctataactacggattgttggatatcctcactaccctgtatccctatgtcgagcagaatggcggtctacagcccttgattggatattttatcgacccttataaccccgtcgtggacttcttcggcgagaatctcatgtcgcctaagaccacaaccccgaaagtctttggaacgcgtttatcacagatcttcaattccatgctctatctcggagtcagcccctcggcattcacgggctctgttaacatgacgaaaatcacacagaaaggaagccaaatcaagaatacccccgtcaaattcatggccaaaaacacccatctgcaaaatatcgtcaaatgtgaccgtccctggctcgccgttctcatagtttcttcagtggttatcttctgctttgcactggtgggcgcctatctccacctcataacgatcgctcccgatcttctaggatcgatctctgttgtcctattgcaaaataagatcgaaggaattgttggatcttcaacatggtcttcagatgaatggtccaagaatacgcgagacacaaaactatggcttggagatgttcagcctgaaactgacgttggatgtcttgcgttaaccaccgtggcacaagatgttcctgctggttcagtgaagcaaaggctgtattattgaaatgtatgctgtagctgatcaagaatggcattctcaggactcccaatctgagcttggcttggtgagacattatatgaaagacttcatgtttttatgtcttttttttatcatatataccagagcactagttaatagattatatttttcatgacacgtcactccaagctccaaagatacctaatacagctaaggctgttcctttgcatctatccattctcctagctacaatatataggcggccgaaactcatgtcctatgcttactatttacttgggcaactgtgaatgcttactaaaaaggctgaagagtacctattgaagaggagactctgaaactgggaaagtaggagcactgacagccctgtctgcaaaactggcgtgagaccagagttgtcactgggagtagtaggatgctagagaggagaaaaccatggggtaattaccaagaatagaaattgattgctgcttttatacacatgattacttggtcatcaaaatctggaatcccaactacactgcctaaataggaaggtaccgacaggtgaatgtgccttcaaactcggagatggaagtcataacaatgacaaaatcacgtggcgcgctcatggtacttcacgaagagagatctctgtgtaccaggttgctagtcagctcgtctctcatatatgcaatttcatcttgtggaaggcaggttatttgtacactagcaggagtagagagatttaagagaaggggaacctttcaagtctaatggaagaacaagcgagaagtgcggataagtgaagaaataattatagtggacgtagtcgtttcatgattgctgagcgtagtgcagaaggaattgacgagaagaaggggagagagaatgatgctttcctcttttgatggggccggatatcaatatcaacaccaagtggcaatgaagggaaaaagacccaaatacaagcttcctgctaacagaactagatcaaacacatctcgacacaagcaacaacatcagctaaaataaagcaacatatccgctcatgagacattagaaccggttgaaacctttcttgatattgtttccatccatctcacttatggggctgctgcccagttcagcacttccttcatctccaaccaactcaataatcttggacccagggggaggcctgaatgggcgcacggccgagtctgctgctttctccacaaccgcggtagtaccacttatcgatgatccagtagcatccgcctcatggggctcataaccaccatgctggttggcaaccgcggtgttctttttgttcctttttctgatgagaatgacaacgaaagcgactataatagcaaccgcagctacgacgccaaccacgatgcctgcaatagcaccaccggagagcgatgaatcagagaagccgctgtcagaattggctgtagacactgcggtggacccggtggggattgcggataccaattctgaagacacagatgaaggtgtggatatggatgcagatgcggatgtcgtagcggatgtagacgtcgataccgcgagtgtagatgtttggtgtttggcatcaatctccgtctcaggcaggacatcaaaagccgcaaatgcttcactggcattctttctccatatttcgcatgcatatcccgccctggagtcacacttgaggtcgcggtatatcgagacacataggccagatccctcgggatcccaggtaaaaagcttttctttaccaataggggaatttgtgcagttctgtgaatcttggccgcgggctatttcagtggcattggtcgcgttggtgtagcggaaggtccatccattcaccaggggaattaggaaaagtgcatataatggtatcatgacggcgacgtgggtcttttgaagagtgaatttaaggaaaggaatgaatttcgttgaggttaaatttctagctggtaaaagtccgggagggggaacatagcagtaatatatagaccctggttgctttgaatttgaaaagaataaacctcgtatttaaatgagcctcgtccgtggagttctagcccacccctgcatccagtgaaagtccccggttttggaccctgagatgactgcagcagccgatctatactaaggagggaaatagaccggtgaagactgaggagtcaatgcatattaacacggtctctagcgcatctccaggatcggaggccggaccggaagagtatggatgagtcgcgtgcgccgtagaagaaccaaactaattactttctcaggaagccataatataacagtaacaggttgaaaccgttctaacctcgagttatactaacgaccttcatacaacgggtatatagcgtgaatactacaccatgagactaaatatttatctgacacttggtggctgaccattcccgagaatacggggtacagtagtcctgtgctggtacttcctaccatgcctgtcagaatcatagtctaaatccaaatgcttttagctatttctgttcacattctgcgactagagtctcggcgggcagccatcttgtccgtggaaaatggtgattggtgccctatgtgccgaatacgaggtgaagaacatgcgaaaaattcagactgtaaactatcagtttgtctgctgtattgtagaaaaagacaaatataatgaatggtcatatctgtaaggccacacataaggagtttgtcgctatattgggtcattcacggcccggggcatcatgaatagagaaaagaaaaacgcacccagtcgccaagagtcacggaccgataatgcttggtgccaagggtctagtatgtctaagtttaagtaatttccacttacttaactccatagggcttctcctcggaaattatgatccaaatccgttctagtagcagcaaatagacgatcgatatagagcgtattattagggtcctacggtagaccatttcaaaatattctcggtgtataaaagcatacaatatagcaatgttcatgacagtattgaatcaaaattgaaatcacttacccataagtggatgagatgtttcccttcgatgaaggctccgagctaagactcaaatgcctgaggtattactcggacgttcgaatcaacagcaacatgtttgtgtaaagttttcccgcaatttccccggagatgaattaaagatcatactaacattgaaagttgtcaataaatatcccagatggtttttgctaccgcatatgacgtcaaaacacagtttcaaaggtatgatgctcacaaagtcatcgctggaaacgatacttgattaccattactctcaagcttggggacgagaatcatgcagtcgactagaaggccaagtatttgattttcttcatgtatacgtatgatagacatcgtggcccctttctccctagtccggttgtcatcaggcacccgacgagccgagagtagagtatgattgaaaggtgacgcagcggtgccggtaaggcccagggggtgtccagacttgctattttgtgagtagctattgctctgccacatgtggttatttttcagcatacttgaaaacttgcatgcgagctccttacatgcgcaagatctgtaaatagcaattggtctaagtacattgatcttgcagctcagcatgagactatagatgtagtataagcttgtacctcgacatcggagctctacggatcttcccttctggcatcttaactctgctaattgcaaaagccacggtaaagaatcgacagggatccaatcaaaccgggagcctgtcttaacttgaaggtcatttaagcacaatgaaaggtaggtaccagggcactcgcatcattgattggcaatgatccttgtccgtcgcttgccggaggttcctctaatgatcgaaaatcatcccggtgagcctgatcacttgtctcaggattctcccgacaagatcactgtcatctgctggagtaatcgtcgagctttctattgcagtctgaattccactgtggtctcacttcgtcttcagaagttttgtcattcgtgtgacagtaggtttctcccccgtgctattgatattatttggtcgtttctttcctcagctctccttggtcattccattgatgtagttctgatacaacgaggtgtgaaccgttgctgaatctgtcctctatagtcagtcatcgattgatatcgccacaaagccgcaatatctagtaagaatacatgcttcaattgtggactgttcattgaatgaggcagccgatgggtccattgtctgaccaggaactgatatgtaaaacagaaatccacttctaacttaccaccgacactatggcaccaaccaaaatagtccatcacaccaagtccgcatccctctctctccattcgattgtcgaaagaagcggccacaagggcaactgggcgaacaggaatcgcggggtagtccttgtcttctgcatcgttttcctcgttgtgatgggaatcttggcactctttgcataccgacgaatgttaagacggaaagctgaaaaggaggcctatgaaacgacgagtgattagttcatcacacactctgtgctctcgctataccaatttccattcaactcggtggtggacgacctgtgtgttctgttaaatttgagctgttgggatgggctgttcaacgctgttttgcttgtttgtgtctacgtgatggggctggtactgaatgggatgcctattggcagttcagttacgagagaatggcatggatgatgctcaaatgcgaaaaacataaactacttaagagttaagcatcaatagtaatcaataatacgttcgagttggtttcacttgcaaaaaactactatcgccctctccgtcattcctgcagttgcaatgtgcacctgcaacttgtacagaacttgacttttcccaatgacacccattctcatatgtgagaccctttacttctctagatattttccacagactatcaccattatttgtccgatcgtgtcagatccttgagatgaaattatgagttcagaagcaggcccgtctggtgttcatccaaccgatgagaagggaaagagaaaatgacccgagtcgcccgctcaagacctaacatctaagaaggtttcacttaaggtgagaggagtcgctgctgtcagagaaccacatattcaccccgagaagcaggaagaggatcatctcctggactatgtagacacatgtcccaaggggatttcatctcaatatccaaaccctgtgaatattggtggtacggtaaaatagaaactcttcccacgcggcaacagctaacatagaagagaaaagtcaccgtggccaattgaagcaattgccatgaattatcccacgttcgatgaccttggtaacttcaaaaatttcgtacgtgattcatgatgaggcagagcttgccgtgtatcttggactgcagcataaacacgacctcaggcaattcgctttttcctggccttttattaaggcatggatcagagcaccgcataatcagactatctcgctaaaattggacataaatcatctcatcaagggtggcaaagaactatcctgtatcgaagatccttaccaagtttggccgcaactccccgaggagtcagaggatgcttctttgcgaattacacacatcatggcatggcatctacttcaggtgtctaaggatattgaggagtacaccatgagcagtgatctgcataacttccaccgcacaaggagataccgcggtgaactaaacgcgatgttggagctcgatatcccgctggacaacatttttcatcctcgtccccagctaatgtcttggaggaacaagctggacgacaaattcgatcggtactggacaatcttggggtatgtttcatagatttcctatatggagtcctgggaaaaagcccttgagtttttcgcctcctcagaaaacaaggctaccatatacgacagcaggatgccgacaaagaccagaccaagacccaaccatcttaagttggctcagcagtgctcctcttctctatccttggacagatgtattgaaggcctttctccaatttaggtaaaggtaaattgggacatggaccaaaacacatatgagaacatgaatctgtgccaagtcctcgcaggtatcgctcatgagggtaaactgctccctccgatggatcaaatgatgacacaagaccctcgatgatgcaggactggtgcatcattctggggcataattcgacatatgatgtcttgtggtggctatgcattgaatttgtgtgatatgacgttgtcgtatcaagcggagatggataactgctattatcagatcgacgctttccgatcacagtggaaggtacttcaggggatataaatgaaacgaccgaactaccaccggtgtattgaatacaacctctcgatctcaacctgtgaggagtggcttttactgaggatcctttggcagaagcactcgtctttggttttgtctgtgacttccattgctattgactctctcgtttccttctttgtcgcttattccccgactcgataatttgccttgatgcaagctacgactctcaatgtatagtcggaggaccgcatagctgatcatgtttttattgctttaatatatatattcttagcccgatgggcttgggtgaatagaaatgttctcttacgcagggctttccaacaactgactcgctcatcacctagtccatattatgtacaaaaacctagaatagcatccttttacatatcaaaaaactggccgttggggctccagttctttatttttttgatattggcttgtatgttgtaaacatttaggggtgtttttatgtggagcacttgcgaaatgttcaaattatgcatgaggatgagctagatgatacaatccatacatctcccgcacttattgggataaattcggacccaatatgtacatttcatacgataatttgacggggattttgacgtaagaatacaatataggctcttatacctctcgaggtctacaaaagacatcatcgcaggtagccccacaataaataccgcggggaactttgagatttccttcccacgcgtcaatttctttctcgcacgcgttgatgctaacaatctcgatgggatctcccgaccaagtatgcgcttctttgcgcgcccagattattgtggcagaagcacaacttgctgggctcaaacgcgaccttgcaaacgccgaacaagcagcgcgatcggagaccgcaacgattgcagaaacccagcatgaggaggaccagaatggcgaagaaagacgatggccattgcttcaggaagaatataagcgatacgggcgacaaatgattgtttcgcaagttggcttgaaaggtaagatacggctacgttttggcggttggtttgagcagtaggactgatggcgatttcaattaaccacaggtcaacttaaactccgatcggccaaagttctgctcgttggagctgggggtctgggatgtccagctgcacagtatctcgctggtgctggtgttggcaccattggactcatcgatggggatacagtcgaggtgtcgaacctccatcgccaagtgctacaccgaacgaagaatgtgggaaagtacaaggtcgatagtgcgattgagtctttacgagagtgagtggatccggataggagtactgagctcggcgctgacgacttcttgtggcattcaccagactgaatcctcatcccacgtatattgcccatcgcacacatctcacacctgaggaagcacctacgatattcaaggactatgaccttattctcgattgcacagataacccggcgacgcgttatctgatctcggacactgcagtgcttcttggaaaaccattggtctctgcgtccgctctgcgcaccgagggccagctgatggtgttgaataacccgccccgaccaccgggcgacaagactggagggccatgctatcgatgtgtgttcccgaaaccgccaccggctgatagtgtggtcagttgtgcagatggaggtattctagggccggttgttgggacgatgggcgttctacaggccctagaggcgatcaaagttattactgcacccgaggttgatggaggttcaaattcgactacagcttctccacgggatcccccgtatctccatatcttttctgcctactcatcgcccctattccgcacaatccgtcttcgttctcgccgggtcaactgtgctgtgtgctctgccgagccaacggtgacactagatacaatcaggtcaggttcaatggactatgtatttttttgtggatccgcaaatttaccctcgctacttggtcccgaggaacgtatctctgcccgagaatacaatcaaagacacccgaacgtcacctccgattcgtcacagctccacaccataattgacgtccgagacgaaactcagtttggaatctgcagtttgcagaatagcatcaacattcctatctcaaacatcctttcctcaagttatcccactgcgttacagaaggctgatgatgagcaacaagctgcgcaagtaccttcttggctaccgtccgaggttgcatcatccgagtctacaaacccaatctatgtcgtatgccgtctaggaaacgactcgcagattgtcgtcaagaaaatgaaagaattaggactagatcagcatgggaagagattcattggtgacatccgcggaggactccgatcatggaaagaacaagtggattcctcgtggcccgaatactaactcaaccagcccgctatattcccacgcggaatctctgtccaaaactcatatattgtcctggttttacccatcagccagcctccaggatccacccgcctcacagtcaatgatgttgtgaggattaccacaccatggctctatctatatccaccaccaatcagtgcgaacgcgaccctcatcgaggttaccgagtgtctggaaaacaccacggctgacgtcgatgtcaaactcatcacatccctcacagcgatctactagagtgacatcaatacccctgtcaccccgttggatgtggatcaacctgccacaaagtgcattgtggttggggttgccgtctacattcgcgcggtcaaagacaaacacgagagacggcacagatgtggtctcccccgttattagaccagccgcaggatccaaccccggtctcatactaggttagatcaccgtcaaatgcctgggttgagacgggactgtgtgtgttgttccgctggctaggacttggatcagagttagcatggacctcgatggatcgtgaatgttaaaacaggaagaggaatcaaaaggacgggcaagtccgggtctatttacttactcgccgagatcatgagaagtgatgctttcatgaggatcaacgggagcgccaatagcaaatcccatgaagaggaatgccatcatggcaatgtcgaaaattgggctggatatcattgtcgggccatctccttcttgctttccagcaaagacagtggttttggcagtaaatctgaaactgaagcagggaggtttcaaacagcggccgaattcgctcggtctttatatcatttctttccaggaagagttcttatgctcggacaatgtgtgtacttacgctcatctaaatgccgcggagtatcagaggcaagagcaaagaaatcgatcggagtaacttgaatgacggagtgagtggagtgttttgatggaattgttaggctgtcgccatctgtatatcggaaacagagcagcactgattttgaacattgtcatctatttcattatatccattatttggcgcaatcttcctttcaaaatctcttatagagaccgttatccagacctcaggacattttcaagcttataatgtacgaaaaatcggaagatcggaggaagcaacataaccttaaagggaggaatacactcggcgattcattcggcatagaagacactttagatagttaggacaactttaggtgtagttccgtgatgtgtggtctacctctacgttccacataagtaagtccttaagatttaccaccttcaagcagagctgttatatgtcttccctgatttaatatctacttgggtcctactttgattctacaagagaagaactttgagaaagatcgcataaatctggagcaatttcaagtttggaggttccaccatctaccattgtcagtactttgtattcacttcacggcgaaagtcgacggttttcgcgaattcacgccatatggcctgcataccttcggtctcaatcccgaaaccgtgggtagcggggggcagataccggatggcagactgatccatagggttatagccaataccatcagctagatgtttagggtgaaagcgaaagataccaaatatagcaatgttattgagtctctctgacgaagctgagagagtccacgggtagctagcctgactagccaagcatcagccaggcaccaataaggcaccaacatgccaagtttactcatgcggagtacatcctcctcccccacatatggcagccaatcacaccagggcggggtgtactgcaggatcggcatttcaaaccgactcctttgctctttcgcattattcaactagacctggaggtttctccaaatctgtcacatttcctgaactctaccattttcccccatttctcagatccatgattctaaagtcacgtgggtgatgtcaaaacaacgctcctgaagattcggatcttttgtttttgttgctgagccgaggccactgtgtgacggcggtaaacatggcgaaccctcaaactcatcagtcgggctcatcctttgggtcaatgccgtcgcagcaggatgctcaagatgatacaagcaagaggaaaacgttattcttcggtttcgtcaaaaaaacatggcagaagacgggcttggacagacccaccatcctcttgatgatgaagtgagttcaggaccaagcctgcaatatgccgcagttgaaatctctaacagccactataggggcggtattccaccaactatagccatttctatgtgagttaccaacctcagaagttcccggtctgtcagaatcagtctaacctttaatccagctaccaatccatggctgttgccgacgagtacacgactttaggctatctcgtggctatcgtctcgattctgggctttgcgatcatgccccgcgcaaagtttatccaaatgatgatctttgacctcttggctgtctctatcgcagcatgtttcgccctgttgacaatgttctccagtgtccgggcgcgccaacacaccgctactgactctactgatccatacaattcttccgcgtccgctgttagctgtttgtggctgttctttcaaatctggatggttcacaccttccgcgccaaaaacccacagctgcagttccccgtgattatttacgcgatttttgcaaatattgcttcggtatacgcgccgcaaatgaagactatgacagccgcgttcagtatggtgagccaattgctcaaagccttcattactggtctcggtatttcaacagcgacgtcgctgttgatccttcctatgacgtcacggcaggtcgtcttaaaacaaatggcgagctacattggcgggcttcgctcgggcttgcatgctcatgctctatactttcaatcattggaaagggatgacatgttcggtcgcacagagacctatgatgatgcccgtgaaaagtttggcaaaaagggaaaggtctacagtcccgaggcagaagcaatccgtggtgcagtccgacagatcacggatatccacgctaaactccacggcgatctcacatttgcgaagcgtgagatcgcattagggaaattgggaccagacgatcttcaggcgatcttccgtcaccttcgccagattatgatcccggttgtggggctgagcttcgtggtggatatctttcagcgcatgtcagactataacagatggaataagcccattgatttaaatgagcctgtagtcccggaggatgtccgacggcgggtcgtgcatgagtggaatgagatcatgagggcggtacacgatcccttcgctgtaatgatccaaactattgacgagggattactgcatacgtcgtatgttttcaggctaacaaagacccccaaacgcagagctacagcgaaatctgaagatgacaattcaacggagcaagacaaagatgtggaggccagagccgataacactgctcctggtgaaaaagcatttatcgagtattttgaaaagaaacttcgcgaatttgggagtgcaaaacgccttgctttgcagacatgggccgaggagaagggtgtcacactcccgcccgactttttcgacaaccctgcttctgctgaaatgccgaccgccgatttgctggatacatcagctacgcaaaaagagcgaagccagcggcagctgtatctatttctctacgtaagcctttgctgtttacccgcttaatatgcccgaagctaacatacagtcagatggaacaattgctgtactccaccggtcaaactgtgcttgactttgtccgttatgccgatcatattcaggcgaaagggaagttatcaaagagtcgactcatcattcctggtggtaagcgcgtgtggaagtgggccaggtcctttttgaatccggaagaccacgaagatgataatatgggtgacattcatacacaaaacaacatcctccagcttggagaggcttataaacttcgtaaagacccggagcatctgccaccgactactagttttcagaagattggggacaaaattcgtgtcattccatggtttctgcgctcgttcgagtcgacctatggcttccgtgtcgcatgtgccaccatgactattgcagtcatcgccttcctacgtgatacccaaaccttctttactgcgcaaagactagtctggggtttgatcatggtcaatctcagcatgtctcccacctcgggacagagcattttcagtttcgtgttgcggattttgggtacattccttgcaatggtagccagtcttttaatctggtatatcccaggtaaaagtatacctggaattatcgttttcctgtttatctttgtctccattgctttctacatccccatcaagatgttccgcttcagggctgtggggatgatcagcatcatcacgacaaccatgatcgttggttacgagcttcaagttcgccgagtcggggaagcggtcgcgacatccaatggacagacctattacccaatatacctcttggcaccttatcggctagctgttgtggcgggcggtatcgctgtcgcattcatttggacgttcttcccatatccaatatccgagcactcagttctccgtcaaagtctaggagcatcgttatatcttctggcgaactactactctatcattcacgagacagtctccggtcgcatgcgtggtgacgagggcgaacgtttactcaagacatctccgggtcgcaaacttgagaaagcacgacacaaagtgttcgcaaaacagatgcttatgctagccggtttacggacatactctggattccttcgatgggaagtcccggtcggtggtcggttcccaaaaaagcagtatgattcgattattctctgtgtagaaaagtatgttatgtgcccccacagcctttctacgtactaatagtccttatctttctagtatcgtgaactacctcagcttgctaggctacgcatctgataccatcatgtatctcggcgacggcgacaatcctacagataccgcctggatgactgattttcgacggctgttcaatgctgctaaagtgacgacccacgaggtcacatctttgctttgccttctttctgctagcattacaaaccgtcaacctctaccgccgtatctcaaagcaccccgtccttatggcttcgcgaaccgcttgaatgaacttaacagtgagcttctaagcctccggcacattgcggagccgggattcgcggcttttgctgttctacaaatttcgacccgttgcattgtcggtgatatggacagattactgcggtaagctttcaatagaaatttctttgttaaaccaggccgggcttgctaacagtgctattcattctaggcttgtcaagggcttagtgggcgaattagacttctctttccatgctgtaagcacaggagagtcattggctgagtcgcgagtgacttctcgggtgggatcaagggtggatttgagcgggtacgcatcatcacaacctgatgatcggcacaaaaacgattgatgtattttttttcctttttcgtctcttcactcttcatgataggcagcttttctgtacatacatatctggacgtggcatgtacataatgagatggcggacatcattatatcattctttatcaacgcagactcgtacaaatcaccgcggttgatttccccctcaacgataccccgcaatatgcttcgccgcagtcggatcaacatcaccacataccccgacttgcaacagacgctcacttttcttttttccttctcaattggggtgcctccatgtaaaaaaaaaaagcaaaatgaccgaagtcaaagtccaccaagctctcttcccccaatctgccggtaaaacagtcctaataaccggtgcagcccgcgggatcggagccgcaaccgcgatcctattcaactctcacggggccaatgtcgttctcgccgacctcccgcagctacgagacagcgccgaagaagtcattcagaaacagatggaattcccaaaccgtgcattattcgtatctaccaatatcatcaactgggcagagctaacagcatgcttcgaaacggcgattaccaccttcggaaagcttgacatcgtcatagccaacgcgggtattatggagtctgaggcggtcctggacatggacaacgtggatgcgaacggacgtcttctcgagagcctggaggcggggagggtaattgatgtcaatctaaaaggaacattgaacagtgaattaccccgccatttgcaaccttcaatcgcaagttgaaacacaattccagctagctcacatgctgacagaatgcctcctcacctaaattagctcttcgcttgggactacactatacaaaatgctccacaccacccacaacaagcccccaaccgacaaagtcaatcttgctagttgcatctacatcgagttatttcggtggtaccggtgtagccgcctacgtcgcgtcgaagcatggcgtgctgggccttctacgggcgtgtcagaatgttgcgcgcgtacacggcgtccgggttaatgctgtcgcaccatttttgacaccaacccatatcacggcgggctttgcgcgcagatgggatgaggctggacttgagaaaaataccccggatcgagttgcagatgctattgcgttcatggctttggatgacaaccgggagggggagtgtgttttggtgagagatatctattgcaaataaggaactggcatcgtgctaaatcgctttcggttcgcttaggttgccggtaagtatctccgagagctcgaggggccaagggcaaagctcttgccttcgtggttgggggtcgatcttatggattttatgggtcaggctatgcagttctttgttagtattgggggatatgtcttgcccaagaagtgctaggggtcactctctcttgcatcgcaaagcaacaaaaatatggtaacggccctgctagacttcagggtggcattatagaggactatccacatcaaggttcatgctgtgtcgatttgctttgctcatttactattgttccatgtactggcactcgaaggtaaatcggaattgcgtgatccccaactcgaagtacctactgtagcattatgccaataatctgactaagaagaccttagaggaataaaagcatgtgactcctcaccatgatctactggaaaacgaagcgagccgagccgatctcgggagaatcccgggcgatctagcggtaaccggtgattacgtactccggagataagggctccaaagctccaaggctctgttaactaaggggattttctgttttccataatttgactcgcgatggtaaccaggggactctggaactttcatgtcgatggtaaggacttcccctgaccctgaatcaaagattattaacatcgttatagggaaatggtatcgttggttccaccctccccgtggacagtcttcatcctcagacacaccgacaacactgaaaaccatccaccgaattctttcgagaaccgacaagttcgaatgaaataccgtcccatttccgtcaccgcttcatttccaactgaattatgtctatactattgatgaggatgcgggtcattttacagtcacccagtgactctatactcgagcgtccgacgtgcagcattggccatggatgatgcaaatgacgaaaccaatgtgcaagatctattgaactcattccaaatcaagcaaagtattcctgcacggctaaacgagctgcaatttcaggtctttacagacttcgtgtttacatggcggttctattttgacgacccttctacctggggaagctcgtttttcatcttcgctgcccttgctattgaattattacgtgtcgcagcatgggacgttggggttaggaatatggataccgaggagttgcccgatcacattttcctcccttccacaatggaaagcgcctgctgagaacatattttggttccacaattatctgatcgtgtgctgcaacaccgatcaaatcggcacctctatggctacaaaagcaaaagattttctatcccgcagtagcaagcacacaacgactgttcgtggtatagccattagcatacggcatatcgcactttttgagatttgcaatggcgatatatctcaatcctcccctattaccctggttaccaatacttcagcactgcgctgctcccctgagtttagggtattggcttatatcttcacctcaaatcgcccgaagggctttttggcagagtgcggagagtgttggagggttacagtacccacggagctttttgacatgatcctcaaggcatccatgccgagggatttggtctcaatggcacaagcgtcctttttggttgagaaatggtattactcttccattccccaaatcggtgccatcagcctacaaaatttccccttctctataccatgttgcggtcaatgagataagtcgggtgcatctggagtctactgctcggtctgctttacctggtcacatatggaatgtgcagagctatcttccaatggtcgttttgacactgataagtatatctgtcctgattgtcaagagaatagatcctgttctgcccttgagacgggtggtgttcaccaaacctaccgcgcaaaacgagtacggaaagcacgcagtgtagttcatggtggcaaaagtacggatttcctgttgcgagtttctaagccatcctgtcgtcggccagagttatggctaatcggaaatcttggcacgcctcctccactaaacgtcgattatacgatattctttagtggagtattttctggtctcgcgtatggatttgatcaatagcacgattcatttacatgttaagggggatagatggcagactgagtacaaaataaaagcttgatcttgcgtggaagttgacgtcgtggccgtgtgggttattagtccacgtgaggttagaatcccgtatcctcaccgtctccgagacgaagtaaccctcttctcgaacctccctcttcttatcttttagataatctcatttggtgtatttattacttttctagaatgctctgtatgcgtgccgcaccggaagcagaagcctgtcaccttcccagttctgatggcgatttcaacaaggtgttatagatgccaaccaccatgacttactgcgcccatgcaatttgtcagcagactatattccagaatggactggatttgaaccactccaagagcctgtgggtaactatctctgtgtgtttgtcctcggctagtcatatatcctttcggcgcggatgatagagctacgcggagaacaacagatgataaggttgtgtacacctagaaccatgcacaatggaatatttgtgaaggagagcacgattacttcgaccttgacatcggaagtaatgatattgccgaagttcagtggtgggctgcaatccttacatgcggacgtggctgggaggaaactcttgctcgaattagtaaacactactatccgccatgggaatgccatttgaacagcagttcatttaaattgcatcattgcgcagaaatgtcatgctcaatttctaccgagccaccgtctgcagcagaagcccaggaatatctttgcaatttcgcccgactctatgatgctttcgtcgacgggttgccattagttcagaaatattccttgccatagctgaacccaattcttatttgttcatgtcatgtatctgcttgactttgcgcgctgcttgactcactcaaacacgtgaatgacggagacaataccaacagtattttggaatcgtaaccatagcaaggtaaataatcatgcgttttaccaaccgtccacatgtaagttccacatttcaggagactcggcaagacgtctcccaaggagacgacccacatagaatcaaagtcctgactagagatttggagaaatatgatttgggtatgtaacatgtacgaaggggagtagaggagtgtccccctgatagcggcccctgcggcgagtagccttcgcgagatgagcgtggaagtagccgtggacatctattcgcgtgagacgttcaaaaaggcctcactaattgcgatcaaattattgggtgcttttcagatttctgtacctatgctttagcagaaacaaaataaagtcaaagccattacctggggtttccctgataatatagcttatccagaatttctacacggtgccatccaacgacacatttatatacggattttacgatacaacctgaatatcaaatgacaaggtaagttctgccaaattctcgttcacgaataaagactccttacgtcatccacggaatgcttctggggtcattgcacctaattatcacgacagccaacaaggggcgaggaggctggaatgcagtatggtcctggcgccctttaacccgtcattcttaagggtcaggctctaatattttccgcgatagaaggtttggataacgaaagatcacatttaggcccaatagcaatggagttactatgtatcccttcttttgtggaatccgcctaaacgtctccattgcaggtttcccgacgacgaaggggcggacagggacctcctattacacaactcttctatcccacgttgatgttggtgaccttataatgcgagctatgaaattttctgcgagaattgctgttcagtttcgattgatgccgcagtcgacctcagaaaccacaatatccaggctcctgcgacgaacgacagtttagcgacaagtacatattcttgcaagaatattttcgacggccaatatcaaatcaaatgggacgccgttcaatagccgaagaaatttacgataatgagtcgaaaatcaacttcggcgtaccggacagtgtccgaagtttggacggtatgacgcaaaacccagcactggggagctcaattcaactgttcgagagcgaaccctcagccgaagaacaacacaggcgatttcaagtgcgagaatggttggtctttatctgtatcgtgatcctggcaatgatggattcgttcaatgcgacaatcttgatcccagctttgcctgtatgtcacatgcaatacacccgtcttatttaacatctataacagagctgatcaaaccctcaattcaggacctcgcaaacaaatttgcaaagccactagcaagcacattctgggtcaacacgatatacctcattttcagcgcaagcagccaactctacttcacaatgatgagcgagatcttcaaccacgggcccatatggatcattgctgtagtcttcgcaacaatcggcacaggaatctgctgcggctcaatgagtctcgcggaactagtagttggccgcatggttcagggtattggcggcggcggcgcaatgagtctgtgtttcattgtaatgaccgatacggcgcctgaatccatgcactcgcggtattcatgttatattctgctaacgcgaatgtgtggcggcattctcggtcccgttatcggcggcttgtttgtcgattatgcagactggcggtgggcattttatttcaactttattttctgcgcgctgggtttgctggctattccgtttgctgtggaccttcgcgcattgagatatatcccgatgcgtaaattgcgcgttttggattggacgggtgctactttggcccttttaggtcttggggctctcctggttggcctttcttgcggtgggacctcctatcgctggaaagactggcagacgattgtacctcttgcggtgggtgctgtggttcttctcgtgcttctgctttatgagtccaagtgggctctgtatccgcagttcgggaagagagtgtttcggtcgaggatgatgactatgacacatctagggtgccttttgcatggttttgtggttagtagacgttttccttgcattcgtttcgtgttctctgacggcagtccaggtttttgctcacttgcaattcttcccattatacttcatttccactcattatatgtctgccactttgtcaggcatcaccttgctagccatggtggggcttgcaattgcgccggcctcggtggttggtgtcatccttgcgagagagttaagatgcacccagtggatcatctccggtggttgggtcttgacttcccttgcgagtggatgctctatccttttagatagctccacgccgaccgtagcgtggatatttttgctattcacagcaggccttgggcatggtttgttgctttcgagttacaatgttcgcatccagaatctacctaaagacaaggatgattctctgccaactctaccaacaaccatgtcatactacatgcgatcctggggtatggcagttgcggtccctattgggggagttgtgttattaaaccgcttcgccaatggatttggcagtgttgagatgaatcgcgacatagtaaactctgccaacggatatctcattctgatgaaggatgtgagcatgacaagtagacagagagaggcggttacaattgtttcggtcgctgcgtttcaagcggtatggggtctcatcacgggtgtggctatcttcgggggaatttcatctggtttcctgtggcgaaaaaactgaatgtgaatatatagtatgtgtcagaattagaagacattggatttgtcgcaacacggacatattggagtagcacaaaaagctgacctgacagagtataaggaaggatatacaatgaaagggcaaaaatcaacgtaacatttgagctctggtaagaatgactcggatttcaggctaaaggctaatttgacataagaatgaaacaccatttctcagctagcggaaggacaatcaggctggcatgggttgctccgtgatcttcacactttctcgataactttcacccagttggcttttatacttccggaatgacgaactctcgcttccctttgattttccagccagaaagcctgtctttaccaagcatctctagtgttttcttctcgaccatactgtatttggagggatcgttccggtcaaactcgaacggctgcttcaaggctactggtgggttggtgataacgcgtggatgtctcaagctgttgacagaaatcgagtgacacatgaaaggatggagaagaatcacatcgcccactttaccagtcatctggcagaaatttgtgcaattcctaacgatatccgagtaaaagggcgtatctgcggggtttccaataggctcttggccacggggatacatatacggtgtcacgccctcaggatgcttgtactagaaacttgagtcagaaatatccaaaagtggaacaggaggcttagttacataccaaatgctcagcaacatatttcatcgcctcaggggcgaccatagtgccacctgcacgatcctggatatctgtaaatagtggtgtaatgagcagggcctgttcaggcgaatcaagaaaatgcgtaaagaagtcgccatcgacatgccatcccggtagatcagcaggatggggccatgtaccctcggattcgggcaatccaagattgacgatcaaggcatcgtcccaagtggctgattccggggctacacggtcttcgccgccgagaagctcgcagatggccgcccatgccttgggagcgaaggtcctgactggctcttctttggtgcctcccatgtggataatttcggttgtccaagtcgacttatctgttggtgacataccgagtctagtccacacatcacctgcccattcggttgctttctctcgcgagaaacagtctggtagacgcacgtacccaaatctcatgaagtgatcgatctgctcttgggagagcttgtatttgggtttagctgccattgtgtctgggtcctccaaagtagagctacagcatgagcccataatttaagaacgagggacatgatttcgtgcaaaagtggcagtttggccgttacctacttgaggaaggtgcttgctgttatgtgattggctccattattctgccgatcgctcggaccggaccagtgataatccgtcccttcctgccatgactcggctgaagaaggaagcggtgaactcgggttctcctatcatttgatatttgtattcctcttcttcaatggcgtctgcttgcagatgaacaatattcattgtgccattattcgcgtaataaatggccttgccaagatacgaattccggctaaacagtcaaatctagttagtgcatgaccccgcaaataaagaatgctcccgggttgcttggcatcaccactcacaccacctcatttcattttctttcaggtggcgtccaggctaatattgttgctcaattcgacacggagcgtgtcagtcggatcctgaacgtgtttggcatacagagatccccaacacgaatcacccggaacctggaacaggaacagactaaaagataacacctgacccaacttatacctcgaatgaacacggagggatatcaattatgtgcgctgccttccccggatttatcaatttgtgggcctcggcccgtcttacctacgattgtggggccgaacggcatttgtctcgtctctaaaggacggaccatgaacacgcgctacatacccaagtacctaaataagcgaggcagttgagatcatgcgactaggctgctatagccaatccaactgtaccgaatttttaaagccgtggaattagcctgggcgtaagagatggaacgttttcgctctactagcatccccattacggcaaggtccgtctgccatacctccaatctggttaggctgtgcatggatatacgttcctaaccccagcgctacacggaacccattctagtgtcttgggaacgcttgagtttctttatttttatctttcccaatatgtgttttgatcgcgaaaactagggagagctgtcgatccaagcaactcagccaagacatcaatccccagtagccggttaatatcacagtttattatccccaatggcaaatatgaatagcttaaaaactccagcggaacccccctatctccacatttctctgccttgttctatcacaagttcggtggacatatcacctttttacccatatatttcagataccgcattcttctaggtagactctacagacatcatgggtattgctgtcggagcttcgactctgcagtccgatttggacgcgactcaagctgcaaagcctgagttagagaaggttaactggtggcaagagcctggtctccgaaagctttattgctgggctgctgtgctttgcatcgcttctgctaccactggatacgatgggtaagcatcacagctctgtggttggatatctatagagctgacggggccttctgtagaatgatgcttaacacctctcagaatttggatacatggcaagtgtacttcgacgaacccagtggcgccacgctgggattgatgaatgcaatttaccagattggtagtcttgccagtttcccttttgtgtaagtttccttgcactgaataaaatgcaagctcgctgacttgaattaggccattcatcgctgatcgatggggccgcaaaattccaattgtgatcggatgtgtcttgatgattcttggtggcttgcttggtgcattctgcacagactatggaagtaagcttggtcattttatatccgcccgtggtcaggtcgttatatttactgatcctatttagtgtacgtcgccggtcgactgctcctcgggttcggaaacagtctggcccaaatggcatctccggtgctcctcactgaaatctgccacccccaacatcgtggaaaggtcaccactatctataactgcttgtggaacttgggagcactaggtatggatccttctagtcagcctccggacactagcgtgctaattgggtctagttgtcgcatggcttgcatggggaacgatgtatattccgaatgattggtcatggcgcagtttgactctgctgcaaatcttcccggctgtcattcaaatcgtcttcatctggtgtatgcttcattttactccttatcctggatttaatccagtggctgaccattattaggggttccggaatctccccgttggctcgtatctaaagaacggtacgaggaagcattggacacactcgcatattaccatgcgaatggagataagaacaacgccactgttcaattcgaataccgcgagattaaggagactatcagcttggagatgcagttcgagaagaacagcagctatttggacttcatgaagaccaggggtaaccgttaccgtttggcacttctaatttctctgggaatcatttcccaatacagtggcaatgccttgttcagcaactacaccaatttgatctacaacagcatgggcatcaccgaacaaacgaagaagattcccgttcgtgaccccttgccctttttttaaatgactgctagcttacgttttattcatagctcaacggtggacaaaccataatcagtctaattgttagcgtttcaagcgcattcttcgttgaccgagtcggccgacgacctcttttcctgatttccacagttggtacgtagcagtacgctccacgataaatttcaaaggctgacttatcaactctctcctctcaggcatggtcctcatgttcctcgcatggactgtcgtttcctccgtcttcgaaagaacccaggatgtcaaaacaactggctacccacaagtcgtcttcgtctggctcttctctatattctattccattgcctggtcgggtctgctcgtcgcatatgcgcttgagatcttgccgtaccggctgcgcgctaagggtgttatgattatgaacctgacggtacaggcatctctggttctcggaaagtaagttgcctgaatatatgtacccgctctttggacgaaactcaccatcttagttacactaacccaattgcgtgggagaatcttcctcagcactggaacttgtcgctgatctacacggtctggatattcatcgagctctgctttgtctacttcttctacgttgagacccggggccccactctcgaggagctggccaagatctttgatggtgatgatgcccaggtggcgcatgttgatcttcaacaggtcgagaaggaaattcagattactgagaaagagtcgcaagagtatagggaacgtgcgtaattgtgtcgttgcggagatatattcgtgcggcatttcagtgccgattgtcgtcagataataatatatttgcttgctactcatgaatcaatttgaaatattcaggtatatttaggcacaacttaagttgaacatcaatatttaataattaatataggatctacaatactgccccgcaaaatcaacaaatgagagagtgtcccgggtggcatactgcctcattcgaaaatcttcccgaccaccttatccaccaagccctgctcgcgcgggatgagtgcagcctcgtattggtcgatctcctcctttatcccgccgaggctcaggtccgcggtgcccggccacacgtagcggctgcggaagacgatcttccagaagaggaatagcacaatgaagaagccgatcatggcgtagtcaaggcagaaccacatgacgtcccaaccgcccttgatgaaaacgtcgtagccgccggccagcagcatgaagagcgtgccgcccatggcgaagtaggacgtgtacggctggaagcggcccttgtagggcagggtgtcgcgggagataccctggcgcttgagagacgagaagaagtgcctgtaggttgcggccgtgcagaggtagttgataagttggcagcaggtgacgaggtcgacgaggtagttcatgacattggccgacgagctgctgacctgcaggaaggcgagcaggcagaagctgagcgagaagagcagggcccagagtgggacaccggccttggtacaccacgagaaaaagcgcggggcgtggccttcgagagacatgccgtgcagggtgcgggttgccgagaagaggaggccgtttccagcgctgaagatggacgtcatgataagcgcgttgacgagggagggcagtccgttgatcttgagccgctgcattgcgatgacgtagggcctgtgcaaaaaacattgttaggataagtgattatggggaatgaacaaacgctgttgagaagacttacgatgcagcgccagtacctgatccagtgagtgaaccaccgagaatacccatgagggtggtatcgttgtacgggatgacgatacccatacaaagggcagatcccacgaagaagagaagaatgcgccagacgaaggaccggtaggcagggggcaggatcttgcgggggttctcagtctcagcagccaccatagagatgtactctggaccgcagattctgtttttgaaaacggtcaggtcccaacgcacaaagtcatactaagaggagttgggggcgcggctgtaggtggcaacacttacgaaaagctggcttgatacacgcaggataggacgcccaggaatttgcccgtccctccggacacgatgtgttcgacaaaggcgcccgggtgattccaataccggaagccgtagcggtcatgcagggggttgccgcccagcatagtgatgaaggtgaagaagaacagccccaacatcagaatcaccttgaagatggacaggtagaactcggagatgccgaagtagcgcacggtggccacgttgaggatagcatatagaacgatcatggcgacaattatggcctcaacggggactttgtcagtccagaaggtgatcataatgttcatggctacaatttcgaagggcactaggaaggccatgttgaggaagaagttccaggccatggcgaagccgagagcgccatcaacccattcgctgccaaagcggatgaagggcgagggcacgggtaggtaagtcaccatctcggcgaagcactcgttgacggcccacatgacggcgccccagatgaagaaggcgatgaagagacctgcggggccacccttggggagagcctggcccatttgcacatagagagcttcaaggttgtcagccttccgtgctaccgttgtgaagcagaagttcttgtcgacttacaggtaccaatggctcctccaatagcgaaaagctggacttccgatcctcgcagcttgcggtgcagatgctgcgaccctgaggatatgttcgcagacatgcccggctgaacatcatcgtcgatcttggacgaaggctccgtggcgatggatggtgaaggagggcccttctcaaaatacttggaggctgacatgttgacgtggtgtattcaatggctcgtcgatgttgagctttggtcgtggaattgaatctcacagcatgccaaagggaccgtctgggctaaggaggaaacacccggctaaatgaaggatccaggtcgggcaatacgcaccggaagctggggtcgaacaatgacactcagagccgggggtggctaacatcgtggcccgctacatctctcattgtaatgtgagataagagattggtaggattacctgtgggaaatctgccctcgggagcctatttagatagcggcccctccttcgcgagctccgagtgggctgcaaatctaattgattgctcttttagaactagaatcagcactaagataactaaattgactggctttgaagactatctcgttgattataggtggcgatttgcgtagtcactctaacagctatcgagatacgcttgggccgaggggtgatcgttagcatatcggcatgtgtggcgggggaatttgtggggcaacgtgacctctgtcggacgctagtccgcccctgtggctggatggcttatcggttatcgcagcactagccatgacagggccacgagggcgtatcagtggtcggggcatccgacgcgtatcaccaccacggtactttttgcctgaccgttgcacatcggacaaaagactgtgcctctgtaaaagatgtaagggcgaggagatatctcagtacatactaccgggtagagacggagcaggtgtgcaagcaagtgcaattaggtgctaatagtatattgtgatcatattattgtgtaaggtgtatcttccaaaagcagagaagtttgagagtgagataattcaactactaatcccgaggccctcgtgatacggaaattggcctgtgcagctgttagtgccgcgctagtcccccactaagtgcccgactcagggttgcatggccatccagcaaactactcatgtatttgctatgagtgcctgtaattgttccctaattcttgttgtggcatgtgctcactgtttgaagctgctgttggatagtgcctcctcgtattggtagtgcggctggaactctacatacaacgtgtcctgtgtgccacgttagcccagggctgtcatcggtcaaaaaaggagtcagtagactacataccggagtgctggccatcttgaagttataagctgcctcatcgtcgctcacgatgtgcttcttgtgtccggcgctgtcagccagcagctgcaccttgcagctcctctccatcaagcagaagaggaacgccgcctcgtccaccgtgtagcccgtcgtcagtaggccgtggttcattaggatcgccgcctttccggtctcgcctaggctctccgcgatcttttggccctccgacgcctcgttggcaatgccgccgtagtctgagtacaccgagtgcgcgttgtagaagtagcacacgtcctggttgatcatctcaagcggccgcgcaaacgccgagtaggcccggccgtgcaccgagtgtgtgtggcagatggcatgcacgtcgggccgcgcgcgatgcacagcgctgtggatctggaacccggccgcgttgatggacccggctgtgttgccagcgacgacctcgccgtgaatgtcgacgcagatcatatcgctagccttcagcaggccaaagtgcacaccgagcgggttgatccagaagcggtcggtccactctgggtcgcgcacgctgatgtggcccgagataccctcggcgtagccctcgcgagcaaagacccggaaggctgccgccatgtgttcgagctgccactgccgcgtctcagcgtgcgtgctaaactttgggatgccggggaggcttttgcctctgtgagccatagaggccatggcgtcgacatcgccgtccattgacttggtaggcagggtggacgaggaatccacgagggctactgttgcggatggtgccattgtgattcagttgtaaaaaataaagtgttgcagagcgatgtattgcaatgtgaacggtcaaccttggaatgataacctgagtagtaagacgtcgggggcgatgtcacacaaatacatacacctaaccttgatcgcaatcacaagcgctctatctccatgataaccccatactattcctatccacactccgcagagccaaaaacaagaggatactagcggcttgcgataagccggcgttgacaagccgacacatgtagattgtcttcgtaatctcaccccgcttggggcgaagactgtatctgtgtcaacccagccattgtcggcctcgccgacagtgcagagctggcacctcaaatcttccccaccaacccgagggaaggcattagagggcatgtacaaaagaaataaacatcacaggacatcgcccagccttggagaaaagttcaacttgtgttctattatactttgccgccttctagctcactcagaggaacgcccatcatggatacgaaggtccaagaggttctcagtccactgagctatcgcttgatccagcttgtggggcatcataatacactgcctgtgctagttgctctgggcgtagtgctagtttcctatgtcatatacaatgtaagacaaaccatgggaaccgagtgtgacatgatgactgacatacaataggtcgcctttgcaaccgacatcccttatatcaaggggctgccggagatcccaggcgcggttcccgtctttggtcatttgttaaagctcggcgaggaccacgccaccgtgtgcgagaaatggtggcgccagtacaaccagcccgttttccagatcaagctgggtaacacccgggccgtggtggtcaattcctttgacgactgcaagaagatgctcctgggcaaccagaacgccgtcatcgaccggcccaagctgtacaccttccacggcgtcatcagcagtacccagggcttcaccatcggctcatccccctgggacgagtcctgcaagaagaagcgcaaggcggccggcacggcgctcggccggccagcgctgcgcaactactttcccatgttcgaccttgagagcttctgcatcgtgcgtgatatgaagggcgacagccgcaacggcgagctcgaggttgacgtgcgaccttacatccagcgttacgcgctcaacaccaccctaacgctctgctacggcatccgcatggacgaggtctacgacgagctgctgcgcgagatcctgcacgtcggctccgccatctcgctgctgcgcagcgcgtccgagaacctgcaggactacgtgcccttcctgcgctacctacctaacaacgaaaagaacgcgcgctcccaggagctgcgtgaccggcgcgacgcctacctaaacttgcttctggacaaggtccgcgacatgatcaagcgtggcgtcgacaagccctgcatctcggcggccatcctcaaggacatggagagcaagctcactggcgtcgaagtctcgtccatctgcctgtcgctcgtatcgggcggtttcgagaccatcccaggtaccctgacgtcgtgcatcggctctctgtgcacggccgagggccagatttggcaggaccgtgcgtacgaggacatcaagcgccacttcccggatatgcgcgacgcctggacagcctccttcgttgaggagaagataccttacatcaacgccatagtcaaggaagccggccggtactacaccgtcagctccatgagtctgccgaggaagacagtcaccgaggtcaactggaacggggccatcatcccgcccaagacgatgatcttgattaacgcgcaagccggcaaccacggtaagtgatcaatcacatgacctttttatgaagaaacacgacgctgacatagtactacctgcagatgtcgaccattacggccccgatgcgggacgcttcgatccagagagatggctcaagagcattgacccgccggccgaggctgaggtcaatgggctcggccacctcagcttcggaacgggctcccgggcctgctcgggacagtatatcgcatccaggcttgtgtacaccgcgctagtccggatcttgtcgtcgtacaagattgtggcgagcgagacgcacccgcccaacacggactacgtggattacaaccagttcaagacagccctggtggctatccctagggagttcaaggtccggctcatcccgagagactcgaacatgacgagcgaatgcttggatgcagccgagcagaggacgaaggagcactacaaggagtagatagacagttcagcatcgtcgttgaaatgtacgtgacacgcagttgatgtagacacaaaaatgaaataatttgaacagtatgaaaagcctcatttccagtcatgtatgatccgtgacgcctgattgattggttggcatgtaggccttttattgctggatcatgtgatccaggtgccttgttactcgatggcctcaaacactcaaaccccatactttgtctatttcatgtgttctaaatctaaaaattcctgacgttttcctctacttctccaattgtacgataattaggaaatactgtacaagtgcaacctcgtctcagagctcgcattattcaacccgtatccagccgtgacaatcatcacaaatcgagaccatgcttcaagaagcccgcgccgcatactgtacacagggcatcaatgctacatcttccgagaccccacctatctaaaacgctcaaatggagtggcagctagagtcccaacgggtcggacagtccgacacgtaggtgcgggcatgtggtcattgccccactgcagcacgccggcttgataaacacatacaatacgaatatacttaggattcgccgagtatcatcaaggtcgggttcactatacacatcatgtcttcacttagcattgagcagcttttcggtgtcaggggctacgtcgcagccgtcacaggagggagcagcggtctgggcttcatgatatgcaaagtaactacgccgaactccgcgaaatgttgcatatatcgataccttggaacactttctgacctaggtggttgtggcaggggcttgtgacaaacggcgcaaaggtctacgttatcgccttgccaacggagcccattgacgagaaggtggcggagctaaatgaaatcggccagtcgacgggtggaagcgcacacgggtatgtttacccaagccgtgtccgctatgtcgactaataacatgtgtacacgggccagattaccctgcaatgtcacggacaaggatgccattgctcgcgtcgctgcctacataagcgagcgagagagccatctggacattctcatctccaacgccggcataaggagagatcctcctgtggcctgcgacgtccttaccgcctctctatccgagctgcagacgtccatgtggtcgtcgcgccactcggactgggctgacacattctgcgtcaacacgacggcacactacttcctctcggtcgcgttgctgcctcttctagcggcggcctcgcagctcgacctaggaggcggccgcaagggcaaggatgacggccgcggcgtcatcgtcatcacgagctcctgcgctagcatgcacaacgctaccaatgtggacttgaccagctacgcgacgagcaaagcggccaccgaccacctggtcaggctgctggctgccaaattcagccgtttttacgtgcgcgtgtcgggcatcaacccaggctgtgagtgcttcgactcttattggattggaaagcagcattgtgcatccatcagacttcatgggtacggtaatggctaattcttcatccttgtagttgtccctagcaacatgaatcccgtaggggaagaagggaacatgttcagctccctgtttgacaaagtacccgccaaaagggcgggtaacgaggatgatattgctggcgcagttctctatctggtcagccgggccggcgtacgttcttcttattctctaaccacaacccttgaaccccgcactaacagctacaggcttatgtcgatggggtgtccctttgtgttgacggtggtcgtattcttcttgctaatggccaagagtaaattacatacatctacaagtactataattaagttgagctgcaacaatactatcttcctttgcagatatatatcgtctccatgcagacattcccgacttccccatattccacaacgcttctctgtccagacaacttcttgctttgctcctgtctaggagctaagaagtggatgccatataagcggtcttaatctgcggggcgcttcggtgttctgtgtcggcattgccgacgtgattgcactaataatacagcgcatccactagtctaatctaactggtagataatcgaatcgctccagtacaattatctgtgtacgtaacttgatatcgtacccaacaaaacaccccatgagtaagggcctacctacgatatatgctaactatgttcactgacaagttaaacaagtgactacttgctgcttgtgcttttgggccatatagaacctgactgcctaaaaaacggtacataagataaatcaactgctgcgattagttccaccaagcctatttgatataaaaatagccgtgccggtggtctttggagtcaagagaaatcagaaagaatagtcaaagatgtcgattgtctcattgtccgatggctcaaggtgaggaattctatttttcaagggtaggcagctgctgataagcctacgatttcagctcaagctttacagcagaggatttgaaagacgttgcagcgcagctcaactttgaattacccaatggcaaggattccgatgattatttgcgtcttctctggtccttcgaggccgtcatgaagcaggtggaagatggatccgactacattcatccggcgctcaagccccaggccctctctacgagccgcagctattggaagccgaaaccagaggacaacccgttcaatgcctggagtcaccggtgcgacctccgcgccgcaaatcccaccagtgatatcctcaaaggccgcacggtagcaatcaaggacaacatatcggtagcagcgctgcccacgacgctcggggcgcccgcatcgcttgtatctggagacgccgtgtttcccatctcgccgatcgacgcccctgttgtatctcgactgctagctgccggtgccgtgatcaagggcacgtctacgtgcgagtgcttctgcgcatcccccctatcattcacatcagccacggggccggtgcacaacccccgcctccacggctatacagcaggcggcagcagcagcgggagctgtgccctagtcgccgcccactcgctggctctggagcaggatgacggcagttgcagctcatggggcgagacggttgagctggccatcggcaccgaccaggctggctcggtgcgcaccccggccgcgttcaacggcctctacgggctcaagcccaccttcggcctggtcccttacaccggcggagggtctatgtcgcccatgatcgatcacctgggaccgatcgcatcccggctggaggatgtcgccgcgctgctcgaggtcatggcaggatacgatggcctcgatcctcggatgacgcccgagtcccctctgatggatcaggtgaaaccgtaccgtcagctcctgtcagatttccgacagcaggtcctggccaggcccagcgatgtaggtcagggctggaagatcgggcttctcacggagtcgttcctcgtcccaggtgtgtcctccgaagttcgtgacaccgttcgcgatgcgacaagaagattcttcgaggcggctggagcgaccgtcgtggagatctccgttcccttgcacagcgaaggtccggtcatctggaccgcatcgacaaggccaaccatgtccagctggctctgccagggaagaccttctggccatctcacctacctgccaccccacctaaaggctaggtggcccccctcgcaggagatgtacgaggtcctcaactcggccaatccggcactaaccaacatcatactaagcgagcgctttgcccagcgcttcctgccggcgggggacgaggcaaaggcccaccgcaaggtctttgagctgcgcgacgcgtacgatagggcgcttgaggagttggatgtgctcatcgcaccgtgcgcgccgactgttgcgatgccccaccccgagaccgtggataaggagggcaggacgccctcggttatagagaggcttgcgccggccattggtttgacgagcaatacctgcccgttcaatgtgaccggccacccttccctgactgtgccttgcggtttttccagccggcccgagcggccggatgtccgtcttcctatcggcatgcagatcattggaaagcggtggaaggatgaggaggttatcaaggcggctgctttatttgaaaggggacgggagttgatatccagctagcttcttttcacatgtttaaatgaagacttgcgaaacaattatattccagcccacatgggatgtaaactagggatgtaaactaatgggcaagtgatctatttctcttgatttgaattttgatccctagatcgactaatccacatctacgttgtcaagaactcggtgatagctcggtccaaccactccgtatcggccttgttgacaccagcccctgctaggtggccccagacagacggaatgaccttcagcgttgcagccgtgatagagccggcttccctctcgctagcctcccagcggaaatactggtcagtccggcatggcatcagcagcacgcgcgctctgattcgcgagagtgcgctctccagcgacctctcgtcatccttgctgtcgccctcactatctaccaagctgctgacgtcgccgctctgccacatgtgcagcatggcaagcaggtcgtcggggttccacccggcatagttcactcccgtcacgtcgcggtcccagtcacccagggccgcgtacccgagcgatctgtatgcctgctgttcgaaccactcggcgctcgtcagccaggcggagtaggccttgccgaaggcatggacaccccgggagatgcccgtcgccggtgatgtgacgcggtccttgtcaacgtagtcaacggcgttctgtagcgccgccttcggcccttcgaggaactggtagttgtgccggctggtccgtgccgaggagcagatgacgacggcgctctggacgaggtctgggtacatcagggtccagtggtaggcgcactggccacccatggagaagccgacaacaacgtcgagcgactgaaccttgaggtggacggtgagaagctcatgctgggcgcggacacagtcgcggtagttgatagagctcgggaaccccggggtattggaggggctcgacgattcaccgtttccgaagagcgctacgacgatgatcctgtgatctcggagcgcgccgtcggcaaagatcgaggtggactttagccggccgcggaaacaggtgatgaccagggcagttttcgacacatctgagtttaggtcgagataggccaggcgggccaaaggtagagtcgtcccatcctggaaggagaagttggggatctcatagagctgggtcgttgtgccggccatctttgtgtgccttgagtgcagtaacttcttatacagcgtctaggtctcggcgcagctgttgttcagagtgaggtgaccacttggtatatttggctagttctagacggcggcattggcagtccattgtctcagctcgcactgctgcactcacccagtgtcaggcatcaagtggaggcttcggaacttggcctgatgatcacgtgtcggacatcccgacgcatctgtaaagtcggatcggccgtcccgacatcgcgatggggcatcactgtgaggcgggatgagcgatgatagattaccccgggccgttgagggtgcccttggcccagaattcgggtatttagagtagagttgagagggacgaggtcatgtactgcaactattatacccaaacaagtcaatctttcgtttctttccgtatctctcaaacacaaacttacatcgttaatcctcggtctgacgacttacgccacaatgtctcccaacggccaagctttcctcagcaatcccgacctgcccgagggtccgacgcggttcccccaagcccgcatcgcgccaccgacctcgacgcacaagaccatctacatctcaggaacggcgtgcgtccgacccgacggcacctgggagggcgtcaccgagaacgccgacggcacgcgcaccctggacattcgcaagcagacggctgcggtgctcgccaacgtcgacgccatcatcaagggcgcctcgggcggcaagggaggcatccacaacgtcatcgacgccgtggtctacatcctggacatggagtcacagtatgcggggatgaacgaggagtggaacaaggtctttgccgatcgtgctagcgcgcctgcgcgggccaccatcggggtcagggagcttcctgatacgcggatgatcgtcgaggtcaaggcagttgccgtggttgagttctagtgtggggatttgcagcgtagcttagacaaaggcagcgggagggaatcacgtgggaaacttggagatgctcggccatgactcggcctgggtgtctggtcatcgcttatcgcggggaaactggatgtggggtgcagctgggctccgggtggatcttttatgaatgtatggtaactgagacttgctgacaaatggtaatatacacatttgtgcggtatccaccttaccgtggccacatggtcttctagatgacgtatttaaccgtgtatccatggatgtattcaatcttgatattcaacataaaactccctaaccttaaagtgacctaggtacggagtagttggttatccaatcactttggttggtcatccaatcactcgagtcaagatacggtacgtatgtactgtaagatatacggagccaaatgataagcaactccaatcttggatcgacaacctacaggctacgcgtattgcgcctacctaatgtaaccataggctatacccgttttgttcaagggtaatgtcgtcgcatcagacagctacggcggaagcaaggacgtcatgctcccggtgtcataagaggaagaagcggtgcgatagggcgttgccatcatgcaggaactgccgggtcgcccatgtgaggtgcagctttctcgacgacgactgccagagtgcatcataccctgtagcgtatgtccgcagcctggagaaaaagctgcaggacatggaaaagaagatggcccagatgtcatccccgcttacagacgggggacccttgtctttcggcggcgatgatcagcaggcttatacagagtcaagtatgggcggcaatacggtggtaatggatcacgactctggcatgcctcagcaggagtccgacactgcgaccagcatgcccggcaacctggccgacttgcttttcccagaaccgcctgcgccaccccctccaccgtgcttcgtcgacgagcttaagacgctctcacttgaagccacggcggagcggcacctcggctcaacatcgggcatctccttcgcaagactcacacaggtcgtgctccgccgactgacaccggataaggccgacttcaccttcgttagcgaccgcggcgcgaactacgccggggcgccgctattcgacttcaactccccctcagacctcttggacccctccctgtttgagggtctgaatgagtctgtctctacccacccgctactatttggtgatgttgttgttgcagacatcacggggttgtccaacgatgtcggcgtggctctggatctgccgagtgaccagtcacacatcgatcaactagtggacttctactttgctcattcccatactctatatccaatcttacacaggggtgagttcctgcagagcctacagcacctccgtgataacccgcacgatgcggcggcgtgctcgcccttgaccttattccgcatctggatggtgctcgccgttgggtccacagcgtactgttccgtttcactgtcagaagagtctgaatctagggtatattacaccaaggcacttcaatatttcgagcaagccatagcctatggcgagatggtgcgtaacccttcaaaccgaatcatctgcttggcagctgtaactcactgactgtggtctctctaggctgcgctggaggccatcatgttgcaggtctcgtactcgttcttcaaccagctaggtccaagtcagtagcatcgggccggacatcggttgaacacgtcctaacataaagctgcagatacctggtatcttgtcggcatggcggctcgactcgctgtaggcatggggttgcattcatcctcaatctatgccggaatgcccgtcgacatggagcagagacgcaagcgcatcttcttctccatctacatgatggatcggtaagtacaacataccgttctatcttacagtatccactgactagctcattagtgtcgtatcaaatgcgctgggccgaccctttgctcttcacgatgatgatatcaacatcacggtgcgacagccccttagcggagcatcctccaaaggcaacacatgctgactactaacggtaaccaaagccctttgtcagtgtagacgacgagaatatcacacccgacggtattcgcccgccgagctccctcgagccatcgctcatggccattccgcttcacatcctcgccctccgcaggatcgccggcaaaatcacccggcaggtctactccaaccgccaggccgcgtccctgaacacggagcagcgcgaggccatcctacactcgctgcacaaggagctcatcgactggcgacgcgacatgccgttcccgctgcccgacgtcaacgaccaggtgccgcacctgtgcaccagctggttcgacttcaactactactatcacctggccatgctctaccgcccctcgccgctgctgcccaccatggaccgcgagcgcgttaagacgctcgctgaggcggcgtccatgtccatccgccaagccttcaacttgcaccgccagcaccggctcgcctacaactggctcaaccttctggccctcttcaccgcaacgttgtcgcgcatctactcgactacggtgcttccggagaacctcgtcaccatcctcaaggagacgagggcgatcgaggacctggacctcgccattgccttgttcgacacgctaggcgtcaagttcccggccgcgaacaaaattagaggcatgattgctgagatttctagacggtataaggacttgcgtgattccggttgaccagtcaacgaactattcgctcctggataaaactttgtgctatatccagccccttttggcatggccttaagcgagccggaaagccagccgtgatagcatacaccacgattttacatctaccgaccgcaccacattgaggaggagaagctgaagagtttttgcaattacttatttcgtttctatctgttagttctatagcgtatatccagcatcaatgattatgtttgccccagtcatactcttcgacgtcgccagactaagaacctgggcggccacatcctaatggtggtgccaataagttaacacaccgttgaagtgacagaaaggttggggttcaaacaacttacctcgactgcgacaaacctcttcagcttggttttttccctgtgggcttccttctgctcttcgctaaaccgctctgcccattcctggtgattaaaagattagccctcattcctatcactcatggtagatagacggggaaatcctcaccgtttgaagcagcccaggcgacacgctattcacccggatcttgggcgccaccatggtggcgaggcccctgaccatgtgtagctgtgcagccttcgtagccgaataagcctgaacgacaagacgttgttagtttctcgataacttacgcaatcctcgacgtggtattccaataccaagctacccggggtcaaggaaacgtaccaacgagctccccataccctgcaggcccgtaatagaagacgtcgtgacgaacgccccctccgtctcgtcgaggtgcggtcgcgccgcctgcagcagccagaggtgcgacttgacgttcatagcgaaggcacggtcccagtccgcttcgacggcgttgtcgtccagcgacgtcgtgtcgctaaagcgagtccagccgccgttagagaagacgacgtccaggcggcccatctgcgcgtaggcctcacgcacaaggcgctcgacgtcgtcccgcgagcccaggttggcctggatcgtgacgtggccatcgccaccaagctcggcgcacagggcttcggcacgctgcgcgttcgcgttgtagttaatcacgacgcggtacccgtgttttgcgaagagacggacggtcgcggcacccaggcctgcgctaccggctgtgatgaggactacgggagtcggtgaagatgccattgcttcgacagtgcacacggggtagatggagtcgtgttgactttgaggtctctcctatggccgatgcaccgaatacttccctgcaaatgcactgctaatatctgtcgtcgtcgggcgggcgtaaacacgaaccaggacacaatgtatcctgctcagtcagccctatccatgatgtcggactgtccgacatcagcagattaggcttctccatagcctgtccaacgtacattagcgccagcgggggcctgataagcacgaaggctatcgatatcgctatcgggccccccgctacgtaccgccaaaggaagcgggggacaaatgctgattttatgggtcgtcttagtggttgtggttagaccaaaaagagcgtcagtatgcggtgcttatcagagctgttatctagtaaggtacaagtggtggactacgtatgatactcctcccaagtcatgagtttggatcagaaagcacatagaggttgaaacctttattattataatttcggctcgttacttaacgacttgccgccattaaaattacaaatagacaattccgcggggttagtgtgagtgagaagctgttccagatggcatccttgtcggtcatcgccgtcgtgttggcgccggtcctcttcctcatcaaatatctactcctcgatcccctatttctgagtcccctgagtcgcgtacccgggcccaaggcgttcgctttgacaaaatggcgtctggcatacgaggactggaagggcgcgcgcacccgtaccatccaccacctgcaccagaaatacggccccgtcgtccgcatcggcccggacgaggtctcgttcaacagcctggcggcgctgcggaccatctacgggcccggtagcaagtacggccgaacgggcttctaccgcatgtttgacgtctacggccgccagaacctattcaccttccactcggcggtggagcacggccagaggaagaagctcctatcacacgcctactccaaatccactatgctcaaggagccctctactggcatggtcgaggagaaggcgcggaagtacatggctctcatcgacgcggagcccgggcacgtgagcgagatcttcagcacactacactactactccctcgataacatcaccgagttcctgtacggcaggtacgggtccacgtctgccctggaaggctcagagccgcaccgggctctgattggcgacatcttagatccgtctcggcgcaagctttcgtggttcaccgtgcacttgaatacagtgacgaagtggctttattcgcgcaccaacacaatggagactgttgtccagccgcttctgcccatgcagaaacccgccacatacaccggcattcgagagtttgcgctgcaggcgtataggagcttccggtcggatatggaaatgtccgagaaggagggtcggccctcggaggaagccgagggctcgtctatcctcgagcgcctctgggcgtaccatcagacccacaagacagacggtctggatgacttggagattgcctcagagtgcgcagaccacttcctagccggcatcgacacgaccagcgacacgctcatgttcctgatatggtccctttctcagcctagaaacaaggcctttcaggagaagctgagacgggaagtcctcggactgtccagggagtcactcaacggccacggccttcccactgccgaggcgagcgacaagtgcatctacctgaacgccgtcatcaaggagacgctaaggctctatgcccccttgccgacttttgagccgagatcgagcgtcgccgataccgtcatcgacgggtacaatatcccggcaaatgttaccgtgggcatgtctccattcaccctccaccgcaaccccgaagttttcaaggatcctcgaactttcaaccccgatcgctggctggggccgcaggcggccgagatgaaccgctggttctgggccttttcgagtggcggcaggatgtgcatcggtttacagttcgttatttcctcctctgtttccttttgtgtagtgggtgtgcaaaacgctgattcactttccaacagcttggcaatggccgaaatgacaacgctcgcggcaacgatataccgcaagtacagcaccacgatcgcgcctggatttgaagacatcacaccggggatcactgctcgattcgaggttttttatgacgatagattccctaagatgctggtatgttcacttgatcctgacttgcacaatccggaaatgacgcgtgttcaacactgatacccctgcaggagcatacttgcctcatcaaatttgaggagcttggtggtaatgcttgaggtagcgacagcgggttaggttgtagatatgtgcccatgggccgtggccccatgccctgtagctatcatattccaagggagatatccatggacttttggttccatatcgttgatcgctaggctgtagtgagcaattggtgctatcccggagcaacctgcaggtagggagacatgaaagaaggctgtccagcgcgcttgcttgcctttcgacccgaacctttggtttctgtgaacttggtggcaccaccagataccctgactgggacagatgaagagtcgagccgaagtgaggcgggcgccgaaaaggcctcaagggattaggttagagagctgcttcaattatgtttacaaaacacggtatacgcgttgtgaaaggcggtctaaaatcaggcataattcaggcatcaaatctacaaaaccaggcattcaaccacgagccgctacggattcggcattgaagtaggtagtgaagagtacttaattctagaagacaacctcccggctcgactcatctgtcggccgtccaaggcacaggacagattctgaccactcatctgcaggactgaacggttcatcattctcccaaacctttttcttctctgttgccagccaagcctctttcattctcgtttgaactccgtaagactccaatagcgcaagtgtcggattgaggtggctgaattgcggaagtgtgccatcgtataccaaaaggtatggatctcattcatcttcctggcagccatgaggtgcttttctccagttgaacgcacacaatcagtccgaatctttaccttagtagcaagattggcccatatgtcttcaacttttattagctttctggataatagcctttagggattgggtatacttacttcaaatgaaggaacgtccttgctcggaagaattctggagatcaaggatatcgtatacccaagaaaagcaatagaaaaagttctcatcgttgaaagcgataaaagtattggcttagcttttcttcgtcttcagagtatacaattgaaatgatatcctcttctgcaggcttatcaatgacatacgcaaccctttcctatccgtaaaagcagaagttagtgtctataactattcaataatattcggacattgacttactttcatcttcttgtgagtggtggctttccagtttttggtattatcttttgcaagattcaaagcagatcacatcctcttctgaggtaaagagtgctcttaggtgatatcgagattttctggttggcatcagtcctcatgtataaagcattgacatgtttcatatctctcagtaggttttcacttaccagcaaaagagtatgtgtacattaaatccttaaatggatccttatcagctatactattcactagtgccaggaattaccccattcgaagacccaaatatgctcccatccactttggtggtttttggtggtgttctgaaagtgaagagagaaaccagtgatcatcaacagaggcagcgacaccaatgcctcgaacataattatttgtagacccacatggacagggagagttgaagagtagggttactcgggatgtgcagaggggcaagtttaaagaagaatagaatgtgaagatatatacaccttcctccagagccgttccttccttttatagccactcgactcaacttccctcaacttcctcaactccacttgacttaacttcacaacttcatcttccacttgcagacatatatactccttgttatcacccattgatagcgtctctcattccaactacttttctttaacaccgatatgcgcttccacattgccgcacttctgggtgtggcctccttggcttttgccgctccatttccgaatgtatcggctcaccctcttcctgacggactacctactccaagccccagtgagctggaggtgattgagcagaattctcacggaactctgtcaaatgcacctcctcccgttggtatcagccaaggaggaatcaccaacctcaagcttatcgcattcaacgaactgtttgaagttgccttcttcgaccaactgattaaaaacatcatcgacagggccttgggttatcgcttcgctgacgaagacgattatgactttgttttggatggcttgaaggtgattctggctgtacgagatgatatttccgtatcgctcggtgacatatactgatatgacgcagcaagaggagctccatgccctggatgccaacaatgccttggcccatgtgggtattgacccaatccagccttgccggtatactttcccggtccatgatttcgataccgccatttcgctcgccaccaccttcacagatgtggttttgggaaccctacaggacgtcgtggagaaatttgctatcggcggtgacttcgcgctaacacgtggggtttcatccattattggccaggagggagaacagcagggttggttccgcatcatgcagggcaaggtgcctagtgaactgcctttcttgacgaccagtgatctcaactttgccttcactgccattcagagcttcgtcgtgcctggaacctgccccaacattgactccattccgcttaagacttttgcacatctcaacgtcatcatacccccgactgcagataccaaaaacattaagttttccttcgataatcaaaaggggatcgaccctagcaccctttggctcacctatatcaaccagcaaaatctgccgatcgtggaatctctccgggttatctccaaagaggacgagacgattactgcagaggctttgttcccctatgacgcacatcagatgaacgggtttaccatcgctgcggttaccacagccaaggggccattcccaaatgcatacagcgtggcgaaagcgactctcgccggacctggccttttcgtcatcgactgattgaactacatcctcaatcgcctctagaagatcaatacttcatacgcacatcactatcattagccctatgacttgagcacgacttgtacatcccatcgacttgaactagttctaggcttattacacttgtcaatgaataaagttcctgacttcctcaacataaatcctagtagatcacatgaaacatattgtttagatcgttggggctcctcggaaaggccgttcaatgcgatgactcttgagcacggccgttgttattgctcaagtaggcaaatatcgctttattaatgaaactgacaagcatggctgcggagatttttggccagagttgttattacgagcaaagaaaccaacaacaaactggattgtgcaaagcatatgtatttatgtagataatcgggctccctgacctcaggatgtcccagtctggaatgatagcctggagataacctttcaaggttccaaggttacccaccgggtggctggtgaagtacccatggacgtcaaaagacaaatgtacatagcaaactcaccttaaagcttaccctggccagcattagcagtgacactggcaacaacagccgtgtaagccgtcgcagccgcaatattctttcctgagaaattggtcaagaatgcagtatcagcctgactaaaggttccggaagacccaaatccattgacctgacagacccgaccaagatacgtgctgcagacagcattggtggtggtatccggcgacgaaaacaactgtccatcaataggcgactcagcaacagccacaatattctggaacacatttccctcagcgagaacatatccgccggagccgatctcgaacgcgtgtcccgagttctggtaccagtagttgttaacctggcgtgtgttagtatgtattcatatttccaaaatagaactcccgagagagttgatcttcccaaaagagaattaaaactcaagaaaaaggcaaaattgattcaactcacagcatgcaaaagtgtatttccctgcacctttggcgcacgtccactggtgtggtagatgtagttgcccttcagggtaacgaggtcgctggatccgtcgaggtagatgccccagtagtggtatccgtcgcaggtggcggagtaatcggtcacgccgttgatgtagttgttggagatggtgacgcgcttggaggcatcagtaccgagcacgatgtgttggcgtccgatgcgggcggttgtgacgtggtcgatccagactaggtctgagttgtcgatggtgatggcatcaccgccccagacgtacttagggttgatgtcggtgatggcgatgttcctgcgtgggtgttagtttcgggatccggtttaattgcgtatagtatctgtaggtagtagtaggcagtatcttactggatgatgatgttgctcgcaccgctgacgattcgcagacccttgcccttgatgataccagccgagccggagccgatgagggatttgttggatttgacggttatgccgaggacaccggcgttgtcactgagagagccagtcagtatggttgattggaattatggggtgtggaatgcgtactagctgacagagacggagggtgcgtccggctcgtagttcgtgcaccagtcgttctggttgatggcaacctggcaagcagacgcagtaccccaaggcgcgcagccagtagaggtagtagttccctctgtgctggtgaagtcgaaggtctgggacaggacgatcacgcgcgctgaagagtcacccaggtacgagaccagctcggctgtggtgctggggtagacaggcgtggcagagccaccgccagtgacgcccttggcaaaaccctctgctgcgccggagacaccgacggccgcagctcgcactgcgagtgctgcaaggatggctgcgatcttcattgtgggacctggtaattctacctaggtctgggggattggagtaattgggtgaagagctgagggaaacatgtcggtcgcggtgggcgtagtcttatataggaacaagcgatccgtctaatgcagatggctctcccaagctgagactagcatgtttgagaatagaatctccgcacccgggtatacaccgtcagagtgaagccgatgttggcccggcacagtaccgaagccctaggtcttggtttagcatagaaacgtgggccccatgtatggccgggtattagcattggtgtccaccattttgcggagaaaagcaacgagtcgtgctatgcaggggttagatttggagaggagtccggaagaattgcagacgcgtaatataggaggtgatagatacaccaatcgggtgtgactgggataattagtatacaaggtcctccgtgaatggcaagttgcaaacattccaggaattaaagtagagtgatccggcgccacaaagtcgtaaatcaggccagcgttggacgatcggctccggtgcatgaagatgtttcacctctgggatgttccccacatttgtaacagttggagtaagcttgacagctttgtggccggactttttgctcaatgaacatgtctccgaggtccaattgagtctctcctttttgtacggactatggtatgtgttcattttctgatttatcccgcgcaatgcccaagggggtttgggggacgataattcctccgtcttggcgatttcctccgtcgatcttcaacaaacagtttgttattatcgcatcaatgagatgcgaagatcaggtccagcccatgatctgagagttacccaccagagctgtcagatgagatccactagaagttccgtgttcgaaataatttcggggatttgttggagaaacattgttagaaatatactaattggcgtgtttcatatagaaaggccatagaaaaagaaatggatgagaatctctaaatgaattctacccattaaaacagtctagtctatataacgaggtgtggtatacaacaagaaggaaaaagatgatcacacggctatacccattttgaaagatgatccactccaatctcgcctagaaagcgacggggagagggcgctgcaggtagccgcgccactcaggcagtgcacggtcgtacttggcgccgtggttcttcttcagatcctcgatagcactggcgtacttgatcaaggtggcctcggagaaagcagtgttcatgatagcaaggccaaagggcatgcccgagacatcgctgacgccaccaggaacagtaataacggggtatccagcctgggcggcaatctcaacgctctgggcgacatcgggaggcacaaggagaccgtcgagagtacggttgccgtgcttcaaagcagcatcgataccctcctcacgggtagtgcgccggcagaactccaaagcctggaagtatgtctcgttcataatgcccttgctctcaagggaagcgatgagaccgtcctggccagagccgaaggcagggtggataccgggcagaccaccctcggagccgtagttatcgatgttgtactggacgaggtcctcgacagagcggacgttagtgttctcgacctcggacaggtagtcacgcaggttgttgtagaagtcaaccttgatgtaggagtaagaggactcgttggagtagccgcgggtggtgccatagtcccagttccagccgtcgggcgagacaatctccttatagtggggcagctcggtgccgttgatgacggtggcgccagcggactcgatcagcttgaccagatcaaggagctgggcgatttggtcggcgtcgccgagggcccagaaggacttccagggaataccgaagacggcgcccttaagagcggtctggttgctcaggaactgggtgtatccaccgacgggggtgagaccctcctgagcggaggtgtagttgtcgcgggggtcaatgccgtagatggcatcgagggcgtaaacagcatcacggacggtcttgccgaaggtgccgacggtgtcctggtgggtcgattccgggatgacaccagcacgcgaggtcagaccgacggtgggcttgatgccaacaatagagttgcgctgagcagggttgatgacagagccatcggtctcggttccaagagcaataggcaccaggttagcagcgacagcaacaccagagccagtgctgctaccaccggggttaacggtgaagttgtaagcactgcggcactgaccaccacgggcactgaagccttcggagtagttgttggagcgcatatcggcccactcactcagagcagccttgccgagaagcagagcaccggccttgcgcatgccgtgaacgacatgagaatcacggggcacgacattaccgagaagagcccagctgccggcagtggtctccaaacgatccttactggcgatgttgtccttgacaatgaagggaataccgtgaagaggaccacggacagtgcctgcagcacgctcctcatcgagcttcttggcaatggtgaaagcatccgggttcacttgcaggatagcactagcaaggctgttagtcaacaattttgacgagattcaacataactaacatacttcaaataaggctgggtctggtggacacggtccatgtagcactccagcaactggacgccagtgaaagtgccattcttcagctcggcttggatctgatcgatcgtagcctcctccagcttgaaaccgtgacaggggcgcatagcgaactgtgcagcgccattaccgcccaggcgagggaagtcataaaggtagggatcgacgaggatctgggagtcgaccaaacagtcggactcttgagcaataacggagctcaccaaggcgagaccgctcaccaatgtttgaattagaggtgccatggtgataattagattgccatgtggcagaaatgccaatattttgggggagttcgtgctgttatacggagtacccccgacaacataccgtggatccctcggtgcccctgcaggtgactaagcaccaataaacccgcatttgcaaaatattctcatttccgctgttttcaatctttcgcacttcctttgggctccgttctttctatttgatctgctttgggcggcttttctattcaatcttatcttattccgtccacatctccgccaaaccatgggaagaaaatgttcaaggcgaccgagatggccgagttgaccaaaatgggccgtttaatttggagatgtatcaattaatctatatgctagcgcgaaaaactttggtacggagtagttggcggaaccgaaattacctgcctccaattgctcgtttaactggatccgaagaaacagccgactccatcgaatgctatcgtaaccgagtgcgctccatttgatcgggcgatcgggctagcagctcgggaagtctcgacccggaacatttgaactcggagggacctgaaatgtcatcattagaaactgattcctcaattcctagcctctagaagaaagactgaaaatgaaggtcggtccttaatagagagtatagaggtgaagaggtgaagaggagaagggacatagctcaatttcaatttctaagagcacccgcgatcgatcgaatcagatccacagtccggagtacggagtagaaaatgtctcttgattggttgcctcgtgccagagattctgcgactagctcggattcctcggcccatgcattgcgtggtgtagattttgattgagcatgtcgcatacgggggcctatgaagtcccagaatatccggaagacggtggaaaagcaagccgcttggagtcaaggcgtgtgctaaccgatttttcacgtgaaagacgcagatcggattagttcagcagacttagggcttgtcttgatctgttgctactcttctatactccgtactccgaactcagttgcagaatattaccccgacggctgattctattattcaccagaaagtttaatgtgaagaatgcaaccctgaaacccgggagcttctccataagcttcgattacgcctttgaacccgcggttccggaggtttatatggctggtacagagttcccgttggccactggcatcctgttccctttgaattattgaatgttaagacccgcttcgagaaaattatgagaattatgccattattatcttcccgaggtcatacaacgtcccagaccttgccctgtgatgtcgttatgtgcaaggtctccttcatctatattcttctatctctaccaattctgatcatgtcactttgaaacctggaatgactgtccccgtcgatatccttgctgcagatgcagcagggagaatccctagcggggtctcgctccaatatctagcagagtctcgcgataggtccgccattgtgggaatcattttcatggtatgcttcacgggcttgttgatgattgtacgtctatatgcccgggtgttcattgtgaagaagactggtctggacgatgcattggccatcctgacattggtaagatcatccacttttcaccccagatctgcacagttagtgcatcgccctcgagccgtgcgcgatagaatggcctatgaatagttacaaaaacataatccactaacaatggcccccatagatgctctacattgcctttgtcatcctctccatcgtcctgatcaacttgggaagcggtcgtcatatcgaatacatccaatatgtgctatcacttcccacggtccgcgaaactgaagtcctcgacttcgtcgcccacattctctacacaacggctctattcctatgccgtctctccggtctagccttctacttccggctgacagcccgctcatcaaaactcaacctgagcatcatcatcgccgcgccgctccttctcgccgcatacctaccacaactcttcctcctgatcttccactgcaagccggtaacaggactctggccctacgagtggcaggaggagccaaagacctacaagtgtctctcatggggactcgtctactccgtgaactcagggctatcgctcgcatgtgacatgctgatgttcgtgatcccggccgtactcatcaagggactgcacgtctctttagaaaaaaagatcaagctatcatttgtgatgttccccggtattttgtgagttcccaccccaaaattcttattcaccaagccccacaaaactaacaatacacagcgttatcgtgatctccgcaatccgcgtttggctcgtagccgcaggtcaatgggactccgacggcagctgggcctacagtccgatgctgtgcgtcgagagcgccgagattgctggaaccctagtcgcgctctcggtgccagcggtgaagcccgtcttcggaaacctattcgcacacatggccgagtatacgtccagccacacgcgctcgcgctcgcggtccacaaaactgcacagcctcggccattctaaaactattcccagtgccgcgatctccaccaatcgggatagcaagcgtctcattaactggtctaaaattgggatggacgattatgagatgatgccttctgaggtctcggtttcgagggatatcttaggtggatcgagggggagtgatcgcagtgaagaggcgaggcataagatgcacggttcgcggagtcccgggattcgggtcacgaatgaggttaatattactcgcgcgcaggagagtgaggttagggttgaaacccccaggtctagggggagttagtggtttcttttcttttgttccaatctgtaaatagatatatactagacgacttatatcatgtaaaaagtatttcttcgggtagcctacgcgccctacatacatggcattgactgcgcattttctttctttatcagccaatagtctatgaacaacctggtcatccagttttttgtcgccgtggcttgagagtatcaagcatgaaacgaatgaccgaagcattatagccaaagccccggtttcccttggttgaaaacagccctcgatatgttcgtgtttgagaataaaactcgtgatgtctcgccgctgtctaacggcgaagcgctatatttgggacgttttaataacggaaatgtgatagacatcatttgcaacagcagtatctagagccacgcataaataaagccttctgtctcgacaggaatctcgacaggaatatcaccatcttcaacctcatctatcatcatctatcctcatctgagcccagctcaagttatcaaatctacaacctcaatatctaccttgttgccgataccatgtcttcaagagctggtcttgccagccgtcaagctgctggttctcaaatcagacaagcacctccactcaaccctccacgctcgtatctcagagtccccctcgatacacccatcactccactcgtgtcctgccatggaaacagccatatcaactttccaaaaaccatcaaagattactaccagctcgattcgatgacactcgacagtctgatggtgtttttcagtcaaatccgtcccgaaaccgcagatactagacggtatcccacgattgtcgctccatggctcacgtgggattacgagcgggaagggtggcagacagacgttatcgatatcgaaagcaagcgctgcaggttcggcgagttcatcggtttaaccgatgagcttgtggatcccaaactcctcaacctgcgaagattgcatgcggagcgtgacaagcccgtgcaaaccccctctggtgaaacgccctccggtgcgggtgctgtgcaaaggccaatgatgagacgggagaaacgaaaggggcttttcaggcggcttccttttggtaaatagtggcgttggtaatttctttttttgggagtcgtttgtcgttggaggcgttaaatagtgtggcgcttattttgttttagtgagacatgaaatgatttgactttctggcctgagttggattattattcggcgcttatactgttggtgttattgtggagatcactctactcctcctgcgtgaataaatagttgcgtaagaaggagagattagcttcatacaatatcaagactcggtcgttcgagtatcatcattgattaaaattcctggagcaggctcaaatacaatgttgtcatttgccaaaatgaaggagccaatctctttagggtgttgttcgagctgttgaataatcaatcctggtgattaccaacctgatcaataatagagatgattctagtgcgaagatatttacgatcaacgtattgtcatgatgaaaatttgatgtataaaagtgtaagaacacttgtttttctagagaatgaaatatcttgaatttgacctgtcccagtgaaccttggccaaacacgttcataactcttacgatccagaatgaccctcaaatacctcattacaggagcgactggaggcctcggtgccggagtcctgtcctaccttgttgcgaatgtcccaccgtcagagtatgctgcagcgtcctcgaaagaggaaaatcgcaaacaattcgaagaccgagggatcgcattccgaatagcaagttacgacgaccctcagacattagagaccgcattcgaagacgtagagaacctcttcttcgtcagtaccaacaccttcgacatcgagaagcggcggaagcaacaccaaaacttcgtggaagcagcgaagaagatgaacgtgaaacatgcaagtcatcaatctccccacgcaaccatcccagctaacatcaaagccacaggtatggtatacatctctcgcattcggcggatacaattccgactccaaggcagctgttcaacaaggccatctgatgacagaggaaatgatgaaacagtaagctaagccccgaccgtgacaatgcagtcactaaccccagccagggccggtatcaacttcacctctatccgtgagggtctgtacacagacgccttcccgatcttcatgggctggtatccgagcacatcgaccgtctacctgccctccgacggatcgattgcctttacactgcggtcggagttaggcgaagctaacgcgcgactgatgatccggggtggacacgatcgagaaatcgtgctgcttactgcgcagcagactatcacattctctgagattgtggatctgatcaacgagacgaccggccgaaatgttcagatcgagcttgtctccccggaggagtttgtgcagttgaagacagctaccgacgagggcgggaagtcggaagggttcttccaggcactgttgtcatggtacgagggtatttcaaagggggaaacgggtacgattgatccgctcatggcggatgtgctggcacgtcaaccagtgccgccgcttgaggctcttcgggctttcttgacggagaatcgggactatgagtggcatcaaaactacgttaatcgcagttagttgttgactgtaatagttggatatatagtatgacaattgtcgcggtttccaatggctaataagttcaaccccaccgggcaacgggccaacgggatgacctcatgacctctgcccagtggatggctgagtcatcactcgagctcccctacatagttacgtcatcccataccaagtgggtccctagttacatagtctccagttgatcaagcacgggctttagatactccccagaagcgctggagtgttcggcaaattcggctgtctatagattagcgattgactatccgaagcatgaactgaattattaccatcctcagtcccatctaggacaatctcatacatctttccacttaggagaatggttgcagggcttgtattagaatcagactgacggggaaattgggccgggacatggagacgaggataactcgatggcgctagaatggaacacattactagttaatatatggccaacttctatagatagaagagtctcactaaggccaaagtgttttgtgtcatggaaaaatgtcagtttacaccggtctctcgttgatgctgttgagctagcatcacgaaaagcttctccgacggatggggaaatgagcacataggcttggccagggttccctataaccacggaaaccttctcggagaccggtctgcctgttgcatcaagggcgatgaattcagtggcgatatggtggaaatggcgagttggagaatctctggccagggcccgcgaaagggggcgaacagcattgcggaacatgaatacagccatcagtagagaagatctagagaaccaatcaatgtggagatgataatctgatgctatctgggctactccatagaggataagtcaagggaagaaaaacagctcaccgccctattcaatagccggcctctttccttgataacaacagtagggtggttagccttttcgctatgtagtcttttaatgggctttcttaatgtctttcttgtaaatctcttctctcctttcttaagctttctagattgagggtatcaaacggtagaaaaaggcttaaagtgggaaaatgacttcttatagttacatataagcttccgtatagttagtatacagtacctacatatttttcagtggctcaggacatacaccgatcctaacaacccatactagccggtggtgaccagctagctacgtactttatactcccttcactccgtatgtgcatatgttgtagtatcgcttctgctaatgatccattgagtcggccggaggagccgttctcccgtctcggcaaccaggaagtagcattgaagcctgaggcatccattttttgtggatttcgacctgggcgcaatcactgatcaatggaggattggagtggttaaatgggatgattgatgtattttctgaatgagatttcattgtcatttccaattgaccaagattgaatccatatatagccatatcactgtgcagtgttcgcagtagccaaattcctggacctccaagtcgacgccgtgtccgcccgaggcttgtaaacacctctgttctgattggctgatatccgctgatgtcagcatctagacacccgtcaaacccgaggttactagcgagacaccttcgacctcatttccttgaagatctctgttggtttgtgacactcgacttcgtcgtcgctagcttagacacttctgaaacctctcctctcttcctcatctctgtgctatcaatcccaatctcctcaccctcttcatcctctctttcctattcacatcggtgtttttttcacatttccgattacccgtcatggcctccctccgtaccacttcgcgattgttcgcggcgtcgcggccgatgttccgccctgccttcgctcgcacctatgcgaccgtcgagcctactcccaccgtgcaacccaagatcaagaccttcaaggtctaccgctggaacccggaccaccccagcgagaagccccagatgcagtcctacgagctcgatctgaacaagaccggacccatgatgcttgacgcgctcatccggataaagaacgagctcgaccctaccctcactttccgcagatcttgccgtgagggtatctgcggttcttgcgccatgaacatcgacggtgtcaacactctcgcctgcttgtgtatgtatctggatccgcacgcccgagatgtcatagcatccgacagcttccgactgaatgctaatcctttgtctgtataggccgcattcctaccgataccaagaccgagtcgcgcatctaccctttgcctcacacctacgtcgtcaaggatctggtccctgatttgacccacttctacaagcaatacaagtccatcaagccatatctccagcgcgatactcacaccgcagatgtgagttattttatatgccagcatcacctccaaaaactaacaattttgccagggtctcgaaaaccgccaatcccccgaggatcgcagaaagcttgacggtctctacgaatgcattctgtgcgcttgctgctcaacctcctgcccgtcgtactggtggaacagcgaggagtaccttggacccgccattctgctccagtccttccgttggttgatcgattcccgtgacgagagaaccgccgagcgcaaggccgctctcgacaacagcatgagcgtctaccgttgccacaccattctcaactgcacacggacttgccccaagggcctgaacccaggtcgcgcaattgccgagatcaagaagatgttggccgtctagagttgtggatataaaacggagtaccgcggaattttcttttctgtccaatgcctttcctctgtctctctatttcctgttttcttttccctttttccccgactatttcacggatgtttctataggtgtaaattgtgaactttgtttcttacaggaatgcactagtagtccattcggttgtatgatgatagcgcatcctatacatttgtattgtaccaatcaatcaatcaatcaatcaatcaatcaggtgtctggaatttccgtatgagtccactatatctgcaatcaatattgatcaacaccgcggtattccttcatgacatgctaagcgaatcccagaacacttatccctctaggcttactcggctatatattctcccacgctaacaccactagcacgctaaaaaggcccggcattgcatccacaaatcataatgcggacacgagcgatactcaactgggctgttagcacagttggtagtgcgcccgcttcgcataattgcgagcgtgcgggaggtcctggtttcgattaccagatagtccattgtcttgtacatctttttggctcgaattttcctgcatttttcttacctttttgctttgtcctcttcccggctgcagctaaaagcgggctataaaatccaacacttcaagcgggattcccattgggccgctcggatggcgggcttacgcgggaagtgcccagttatcagccaatgcaccgcacgtcacatcctttcgaaccagcggcgctccattgtttccggcgctgatggacaaggaggattgtgcccgagtcgaagctagcgtttgatgcgcctgcacctgcacagtgggtgaaatgagattattcgacgaatggcagctctatatagtaccttagcgacctgccgggccgtgataatatccacaatatggttgtgttttctaaataagcatgttgaatcaggaaagagatgaattgtacactaactatgcactgtctactccgtatgcaccaccgatctcgtgcgtcgcgcctctcttttaatctaaacccatgtcctcacccctcctatataatacatggccctcgctcctcttcctcgctatcagtgagccggttcgactataatggattccttgatactatacgtggcattgccgctgggactactggccttgcgcactgtgtaccatctgtacttccatccgctatctaagtttcccggtccaaaactcgcggctgcaacctttctctacgagttctactacgatgtgatcaaaagcggcatgtacatctgggagattgagcgcatgcacgagaaatatggtgagtatacagatccgtcaatatcaaccataaaagccagaggacaacccctcatacctcatccaggcccaatcgtgcgcatcaacccacgagaaatacacatcaaagactcaacctactacgacgaaatccacgccggcgcctcgcacaaacgctctaaagaccccaaatacgccgtagcctttggcgcgccctactctctcgtgggaacaataacccacgaccaccaccgcttccgccgcggcctgctgagcagctatttctccaagcgctcggtggtgaaccttggcccgtccatccacgacaaagtggacaaactaatcgcgcgcttcgagcaagcccaccaagccggcgacgtgctgcacctacaactagactttgctgcgctgaccgcagatgtcattaccgactactgctacggctggagctacggctacctagatggtgagaaggggtcgcggagtaacgacctcgtcgacgcggtcaatgggctgatggttatgttccatatcaaccggttcttcccgttccttatttccattttcaggaatgcgccgcctaccctggtgcgctggctgcagccgcacatggcggatttgtttgatttgaagaataggcttcgacagcaggcggatgatactctgcagaaacagagtgtacggaaggtcgatactgaggggaggtcgactatatttgatgcgttgactagtttggatttgccagagaatgagaggacgcttgatcggctggaagatgagtctgcgctgctgcttggtgctggtacggagactacggctagggctatcactgtcgcgatgtttcatctcatcgacaagcaggatatcatggcgaagctgcgggcggagctgaagactgtgttggcgacaccgctatccaaggcttcgtgggcggagttggagaaattgccatacttggtgagttattgtttctgatccctttgttacttccgttgtggattgctgatttcgtcattccctggactagacgggtgtcgtcaatgaaggtctgcgtctcagccacggcatgacagcccggttggcacgtgtttcaccgactgaacccatgctctatcaggattgggttatccctgcaggagtaagtaaatgatactggctactggcttactggctctaatcttccggttcgattattgggagtgacacatgacggcaaacctaaagccgacttttttgggggatgctgctgatactatgcattgcagactcctgtcagtcagtcgaactacttcgtccatatggatcccacgctcttccctgagccggagaaatttgacccagagcgttggatccgcgctacggcgaatggcgagtatctgagtaggtatatcgtctcatttaccaaggggagcagacagtgtctgggaatgaagtgagttgtgcatatgtatctgcctgattttatactaagattttatctagtcttgcctatgcggagatctacttatctttggcacatatcgctcgtcgcattgacttcgcactgtatgaaactactgctgataatatctgtgtgtatcgtgatatgggaattgggtgtccggaggttgggttgtttggtgttagggctacggttgagggacttgtagaggaataaggttgtgttactgtgggctgtgcaagtttcctctgtgatcatggtcatgataatataggagagtgaagcttgtacttttgtcgatattaagggtcttctgcggtgctatttgacttgcgtgttggttatgcaggtaaccgcgttgtggggtatgtttcacttggtgaggtactgcatgactgaatgatgacggatatttcattatgatggttttggatgtattcaattacgcgatgtaacggatgcacttgcgacgatatttattgcatatgtaaagtcaacctcttttttaaaattgactctagatggtctatcattgtaaatccgccaaacatcaactgaactgagtagtagacaatatattttaaccagcctctgtccatattaagatcatcaaagtagggctagtatcgggatcatactcatgatggaacgtaacagacttcaacactctatgaaatatgatatctaaaaacacagatcagatctgacgctatcctgcgaatgtgtgacaacaacgcagaaattaaaaagtacatccaatcaattccaatgcaaagtaagttcgggatatcatgtactggttggctggtggtgcaaggggggttgctaggggatacctcctgcgtgccagaatatcccctacacattcatcaccctttgaaccaagttttgacgggggttgatcaccttttgtgtatggggtacggagtagacgtctccctgaattatacctggcacagtactagtatacaacataatctgttcttcctaggggtcatccgggaccatccgcctaagatagctaagatagaaaatgagcaacaatctactttagaaacctatcaccctcattgtattgctttaacctacgtattcttcgctcgcatctatgagggaactgaagggagctttatgtgtacaatgtcacattacctccgtcatccacccgttgggtttgcacgctttgactacgtaaaatgttgatcgttagattaatctccagcctccgacaagctatcctctttcctgggcaggtccccgaggcgatcattccacaggagcatacacggcacatggaaccctttgcaaccctccgataggcatagctccctgctatgtagtcgtcatctcagcgatgttgatcactattaatgagagcgcgaggcatggaagatacaaaacaacagtttatccaaagccttacatcgcctacataaacgctagtacaaccctgtctacaactatcagccagtctttcatttgcttctctgaccatctatactctcatttattcccgaagacccacccaggccacttaaccaaaaatgcacgtctcatacatctccctggcgttcttcgccgtcggcgccatcgccgcgcccgccgctcccaagcccagcaatgacttcggagacatcactggcggcttccctttcaacccaaccggctcctccagcattgaagacagtgatgagggattcggcaactccttcccctccgccctcgacgcaatgcaccaggctttggccgagaagcagcagtccgctgaggccgctcagcatgcatcgacctcccatactgcggtacccaagtccacccacgcagtacagaacttcccggctcctgtcgtctcccaggcctcaagtctctctcaggccacccctgtcgcctcgcaagctcctgtgatttccaaggctgcctctaccaccgccatccctactccatcccacggcgtcatccctactcccaagggcagctctgcttctccttcctctagcgcaactccctcccctagcccaactgcccccgctggccctcttagcggccttgtcaatggaattcccattgttggaggtctcgttcacggtcccctggctggcctcggtctccgtcgttgagattagtgttaatgtgatgtgactattgccttatgcactcttctttctttctttctttgtacttcagtacctctgtcaatggcttggtgcttttccttttccttttctttctttttttttcttggcaatcattcatatatccagtgactttaatttataaaatctgttttggctcttcatacattcttagatcgatgatattatgacatgaaataagacaacatctttaactcgacgggtatctccccgcagaccccaaacgatcaatgcatccctcaacagccttctgcatagcattggtcgcctcctccaacagcgtcgtcaaaggcaccttcccagccatctctgcctgcaccctcacatactcattattcaataccttattgatattgatcttgctaactccgcaatctatacacttcttaaagatctcctcggtaaacggatccgccccgtgaagcacgagcctaacctcccgaccaacagcctcattaatagacttcaaccgctcatactccaactgaataccgcggggcccatactctccatgaacattcccgaacgcaggcgcaagccaatcaatcccggtgttcacaaactcccgactctcctccggtgtcgtaagcaaaccctccagatcagccgtatcagcaaccccatcctcaccaccctcaatccgaccaggctccgcctccgtcgcgatcccccgcgcatggcagtactccaccagctcgtgcgtcaaagaaagattctccgccttctcgtagtgtgacatgtcaaccatgatgctgtcgaacccacccaggtccgccgcataccggattatctcgggtgtttgcgcgtgatccatgtgcacggttatgggcaccgtggctttgcgcgcggcttcggctgctgcgtgcacaagtagtccgtcggcatagtggatggcccacgggaagaggaggatcatggctgcggagcgcttggcttcggcggcgcggacggtcgcaaggatgccttcaacgttgtagcagcacattgcggggatgccgtaatggtttgcggaggcatggtctaggatgcgcagggcgcgattttcttggagagtcatttttggtttgggatgggtgggggtgaaggtgagggcaaatgaggggtttgtagttgaggtttactgtagaccgagagtcagtagtgttatatagtctcgttgtgttgtccgacttggtcgcttcacgtccgaactgtcggagttgctccgtgagtgacgtcactctgagctgttcgccattttgtgttatctacacttcctacacccattgacacgcaaaatatgggaaattataccggaggaaatcagactttcagtacatattgcccatattgtcggcaattgtatgatatacagtacttccactgcctgagcaagactaacaacttcgacagcagaattcaggcacggggaaagtagatcagatcaatgtcttattaggtttgttttagatgttaagcataaataacattctatcaaatcaaatccgagagctaccttggttagctcttcaaatataaaaatgaagttttgcctgtggtggccaacttccgaacctctcccaagtacaacttcaacaagcacaagaaccaccagactcgcatctactaaccggaaatcaatcaacatacaaattccaaaatcggaccctggcaatccatcaaatttcggcgaaagccaaggtaaacctctcggacttgcgccgaaccatcccgcgctccaaacatcttcccctcataaacccccacgcaggtcgagccattttaatatattatatacattaacatttctccgggactattctatcaattgtatacatcattccctcatctaaacaaccatgtccaaaccctcaatcggcttcgttggcctaggcgccatgggcttcggaatggccacacatctcgtgaaagagggctacgcagtacacggcttcgacgtgttcccggcctcggtagaacgcttcaagacggcaggcggaatcccagcgtcttccctccaggactcagcaaagggaaaggacttctatgtttgcatggtagcctcagcgccgcaagtgcagagcgtccttttcggtgatgacggcatagtcgcaggtaaaccaccaacccaaccccaaactaaacaatatatatttgaaaataaaaactaacccactcaataatcaacccagttcttcctcaaaattcaacccttctcctctgttccactgtcccagcatcatacgcccaatccgtcgccgcagagctcgcctccatcggcaggagcgatatagctttcatcgatgcacccgtctctggtggtgcgctccgcgctgctgcaggtacgctgtcgattatggctggtgcacccgacgccgcgctggagaaaggccgcttcctgctgcaggagatgtccgacgcgaataagctgtatcttgtccccggcgggatcggcgcaggtagtaatatgaagatggtgcaccaggtgctggcgggtattcatatcctgggtgctagtgaggctcagggatttgcggcgcgactggggttagatgctgtgaagacggcggaggcgattaagtctagtccggcttggacctggatgcatgagaatcggttgcagcggatgctggatgaagattggcatcctggtgctagtgctttgactattattctcaaggatgtggtaaggaatcttgatgtttttggggctttggggataagttggctaattgagtttcgatcaggggattatcacgacatctgcgcgccaaaatcaattcccgactccactttgctctactgccgagcaggtttatttgtctgctttgctacagggatatgggcctgttgatgactcgtctatggtgcggcagtacttcgctgagccgataacgaaggtcacctctaccaagtctgatgaggagacggcggaggcgctgcagctggtgctggatctgatggaggtgactaacctcgttgcggctgctgaggctatttcatttgcgcgctatctcaatgtcgatttgaagcagttttatactcttgtcggtgatgctgctggtgctagccggcaatttatgacgaaggggttggagattattgaggggcctggacaaggtggggatggtgtctctgagactattgatgccgctagttctcgtctagagaaggctgtgcagaaggcgcgcgatctgcactgtcctttgaatctcggcaatgctgctttgactgtgttgttcatggctaagaggtctgggttaggggctgagggaagtgccagtgtggtgaagacttatgagcagtagtgtaattgccgagaatgagtgatgaggtatgaaaattattagtccaaattctacatttgtgctgagtccgcacgcccgatggcctatgctttcacaggaacatgaaccatccaccgaagaagctcatagatgatctgagtcaccgtaattaccgtcgtctctgccttattgtcgtacataggggcaaactctacaacatccacgccaataataggcaggccagcttgcgatagaccatataaaatacggagaagctcccgtctcgtccaacccccaggttcaatggttccggtcgcaggtgtgaaggcttttctcggtcagtataagttgcttaggataatcaagattgagtgtatagtatttaccggggtcgagcacatcgatgtcaatgctgatataaacatagttatcgccgactgtattcacaattctccgaataatgtcgttaattctaatcttatcgatcattcgggcacggatagtagtaaagctataacgatgacacggtgaatgggaggccagaaacggccgcttttgacgccgttttaggccgctcgctcaccgtgggcggtcttggcgtcacgtgggacaaaggcgacggccctgctgtttaatgccacccgggcgttctgttggatgttcctggtgcctgacccatcgatccagccctcggggcggaatgtatgttgtacctaccgagcgcgcaattttaatttttttttgctgatttgatacattacgataatagtcaatgtctgcgtctacctagacatacgcacagcctaagaaaaggcacatgcagcagagcttagatcacaattcttgaacaatgggttattggggaatgagcccggtgtgaatggactgggagcctggggaacaggctggtagtatagtgactctgtttgaatcatccccataaggatgttgcttacaccagaaagctgatactgataaagtgtgcagtgctccgacgccgtgctatatagccacgcgagcttactctgaatcagaataccacggcctgcaaagacgtcgatttgatcttgggtagtcacatccatatcgtgatctgcgacccaaacctagatgttttctagataggcatttgacgaaggtgtgagatgaaggagaagggatgccgcgatgtaatagaatggctatttctaccacttgccgcaccccaaattaggtaggcacctaggataaggcagatcctaatcactattggttgaagaaaccaacgcaatgatatgaaggtaactggtcgtaacggaggttgatacctgagtatagttgaaatacctgctattgattcgcgcttcttattaatttacatatctttggccactcagcatatgtttcatatattctcactcagcctaaagcaccaagacaaaggtctctgatagctcatcggtttgaaaagtcctcgcagcttgtgaccagggagtttctcccggtgatcaagtaggaaagcaagatctacccttccgtgatacattgcaccacttggacatactatctctttttcaatattttgcccttgccgctgagcttttcctcgtcccctagaacgacctgtacatatctagatctcacgcagcaatgatccatctaggagaaagtaagtctgagaagtcatgctcgttcagtgctgcccaagagcccccaccagccttggacggcagcaatatcaatgtcgagagcgagcaacgccaaacccagaatggacgggctagccccgaacaggccggaccgctaagccggatcccgagggcggccgaatccggccgggctggcacaaatgccgattctatctgaagtactatcaattaactactatttacagctagttataactttcctagtctctccgggtttttaaaagaatgtcttgataatattatcactaataaatacattgtgtgggtatccaaaatattatgtccagtcataagaccaattagtatgtacagcccaagagaccccaacaagcgcaggggtacctgaggccaaagaagatatatataaaaaaagaaagagagacatcagggatatcaaaagtcccaacccaaataatccaacgacttaaactcatttcgcatgcgacacacagtaaacatctaaacctcaattccgagcttgacagccgagatcgaatcagccgagatcctgcggtccttaataaacttaggccaggtgttcgtaagcacaaggtacttaatactggcctctgcatcatcaaagatcgaagcgttaaagtccgcagggatctcaccccagtactgcacgcggtctttgatcggtccgtccatctcagcttgcatagtcttcccagagtccacagaagccggcgacggcagatcgaaagtgaatttatcaaaggggctggtgggatcacagtcgcgctcctcgccgtacacaaggcgcgtcggtttctcgaaaacgtcttctagtttccgcagctcctggtgcgagatgttgacgggaaactcggcatggcggacgctgataaactccgcatagagatgcagcgcacggttgaagtgttggcggacgatatcgcgcttgctcttttcttggagcgcgctgccgtccttgatgcattggggtaggtggttgcgccattccgcaacgctagtcaggaagacgatattctcgccggagaattcgcgcagagcggagaactcttgtagtggagctggattgcgctcgaggacgtgctcgagtgcgcccattgtcaggatgctgtcgcgggagttgaatgtgctcgtcgagctgttcgatttccagcctgacatcatcgatgctaccattgtcatgtcggagtggagggacttttcttcggagctggcggatttgactttcaattcccagcgcgcgatcgagtcgagggtttcttgtcggagggatcggtggcgcattacttcccagcaggggaggaatactgtgaatatttcgatgaacatgatggatagacagatcctatagtatacctgcgttagaggagtaggtctttgtggttatgtgtggaacttaccactgaggaggaacgaagaccgcgttgaccggggccatggcgggggcgtagaggccgacgagccacatcggggtagcgtggaggttggaaacagcgcagccaatggtctggactctccagccgtgggtatcgtggatgttgcgagactgccagaggacgatgggggcaacgatccaagaccagaagaattgcgagaccacaccgggccaccattcccatcctgtgccctgtgctgcgagtacctctgccggggtaccatggactccggtgccaggaataccccatgagctatggtatttgcgggagatcacccacatgaggacagtgaggaacacctgcgtgagatggcgagttagataagatttctcatgcatatggaaaagcaaggtaatcatacctgagcaaacattgcgatggcgacgtaaataaggatcttggttgtatatccgagagcacggaagcggttgatcaacccatccttgtgttccaaggcaggcgattcagtagaacggtgtccatccagagcatattttctctggagctttgcgacatgttgaaatctggtattagagccgtggaagagcgccatgccacagggcaacagagtccccatgagccaataggcgccgtcacctggcataatagcgccgatcatagtggcgaactgggttggcagccagtataaatgaagaataacgatagaggttaaggatagagcgagacctcgaatgcgaagcgtcggcatatcacgattggcgatcagataggccataccgaccacgagggcggatgtccatacacatgcccaaacagcccaccagatggtgacggggccgagatcaatctgaggcttagactcagccgtggcaccgtattcggatcccatgttgaaaagtgctgaaggaatgtgagtgaagttgggtagcgcttggtcttttccagagtgccgggtcatgatcttcttatgtagaacatgcgtggaactagggccacggggtaaacttgcacgagcaagtggacccctaatcaggttggatgtcgatcataatggctgaattatccatcccactccatatttctgctaggaaacattatgttgtggagtccctcaatcgattgaggtatatcactgctcagttatggtcttgagtttggtcccgcgtggtggatggagaatatccacagttgctatttgtcaatcgatctgaggatatgattggttgaatatgaaatttcgagatcaaagatctcttggcagcacgaagctctccccttttctattgaatcagcctttgacgctattgattttccaagaattgtgttccgtgaaggaagtcgatcgtagccctaaaaaggcagaacttcacattttggtatgacgtttgaaatgttcacttattacagtgataggtgtaattatttccagactccctgctaccgctaatgcgcgcaaaattctaggctgtttcatacccatgtcaaattagagacaattctctactattggaggaatagaccaggatcacatggaatgtaagataatgactttgtcgacttggattaatatgtagaagtatccaaatttagcctagcatataagacacggaagagactcaaatttcaatagtagaataaaccgaaatgaaaaggttcaagctattctctgccacgacatacagaagaaatcgtaattaaaggaatgaaaaaggaatgaaatccataaatcgcacatcacttaatacgtgaaggctcaaaaagtcccatggctttggcctcctcctcagatcccgcctgcaaattcccagaatacttgatctcaaatccaggaacaagcagggcatccttcagacccctatccacaacctcctcctcagaacgcgcatacatatagccgtaatacgtgtattgccccgcctcagagatcgacacgctaacctcggccttcgcacaacaatcccgatcatgttcaggatccttcaatcccatctgaaaagcatctaactcacagtcagcctcgacataaccatagaacatccctccatagtaattaccacattcaccaggaaccggcgccgcatcacagaggcccatatgcccaacctccttcagggagatcgcactcataaacccagtgtacctatgacgcacgcgctccggcatcgtaaagtgtgcgtccttgcaacacccccatggatggcggatatccgaaagtcccatcgcgcgggcgtggtgcaaatcatccgcccgcagcaacccgtagaacttgccgtcctcgccggggatccgacggatatcctccagccagcgcttttctgcctccacctccgatggtgcatgcattactccatagtagaggtgaaagtcggctcgtcgctccgcacagcatcctcgcacatgaatcgggtcaagtaggccctggcggttcgcgtcgtcttcagaatccgccatcataaacccttcccactcacctgagtaatcgccgtacggccggatttcgcgcagccctcgttggtaggcagattcttcgcttgcaaacatgctgcccatgtacatgtgcttctgaggccgggggtctgggcctggtggggcctgttggctcttgggggatgtacaattgcgtggggaaatggcgatgctggtgtcatcggggggtgcggggatggaattcttcgcctcccacatttggacaagggactctgtgtcccagatatgggggtcttcttcgatacccagctcggcgttcttctcgcgccggtcgtcccggtccttctttagaagtgcggtgtctaggagcttggacatggccttctcccgggcttttttttcatcattttcttcaatgcacttcagaacggtcgcttcaatacgctgctgcacaaggtcaatgtcaagagcggactcttcggacgagtcatagtcaacctcagggctatcaactgagtccgcgggaggcctgtcccccagagcaggatgaggatggtctacatcagcaagataaatacgcacatccacaccggagtcgtcagcttcgggctgttggtggtcagtgtccacctcccgccgccgctgtcgcttctcgaaatattcgtcaattctcagcttaagtatattgtaccttatcaaagaagatccgcaaagcgacgatccagaactatccgtgtcgcagctgcttacattgctgggagtagcacatccagtgccctcagtatccggcgattcagtctcaacactttcctttgaatagtcactctcacatccgctatgggcaagatgagccggactggtcttgatggttatagatgcaaaagagtcaggatctgcagctatctcggacgaaccggaattagtacgagccaatttaaaggccgtgctagacgacctctcagaacgggccaggcttccgtaatccgactctgattcgctgacaacagcacgcgagcagagctgaccatcgtcgctgtggtcagtactacttgtttccctgtcatcgggagtgggatcactcaccatgcgcgcgctaacttcgatcacatggcctgtagcatccaggccttcaatcgtccggtaagatttggcggtttgcgtctggtcgtcttcttgagagacgttatcagcccactcgctctcgcactgcacgcacatgctgggctgggtggagaggaggaggtcgtgggagggtttgacctggttgcaggatacgctgctctctggaccggccaggcggatcttgttggtgtattcctggcagctggtcatgctccagttagagatatgtccgcagctgggatagtggtggtaggtgtgtttacacattctaaggaaaataatagatgagtagaaagcagagagaatatatgagatgagacaataagagagaagtaatttgccatattagataaatattcgcgaggatcgtggtttatatatactttgatctgtgagttgaggtagtctccgacaggcgagtacaaagccgagtcgttgaacaaaggcaagttatataacaaagacagagttaatggcattgttttggtcccatgatgaaactctctgttcaaattgtttgtgaaaaattgtgtataatgcattcccaaagatctttagcctattagacgcgcgtgtcaaagggacttgtgggaaacgcccaatcctcattgtatccaacccagatgacacgtaaagcaaacattgttgatttcatgttagcatggtttcctataggtctagtagcccagtctaaataaaggcagaaacaaatggcgtagagagaaagagctgctaatatcggacatgttttcctttttgccttccccccgctcttgaattctccctcacacatttgtcttccttcgtttttcatatatgagctgcaaagcttcgtcgtagaagggcttctccagtttacacaagaccagtatctgcttggagaagagctgacaaattcctgattgtccaatgcaaaagaactggattggaaacgcgaatgtcgatctgggaccaaggtgtctgacagctcaatcggtatctttcatcggacccggtatacactattcaccacataacagatcctgggcaggcactggaaagcataagagaagtttccaaaatatcatttcatgtacaaaagtcgcatttccgtaataacagtattcccatgaatatattgcctccaggacatccagtcagccctccaaatccgccaaatatctaactccagagtccatcagccaccaagaagcagtctcgtgcatccatctcaaaacaggcctctccaacggcatcctcctaccctcatccgctctcctccacataacagtctcactacaaaacacaaccttcccttcctcctccagactactactttcctcataactaatcgccaaccttccttccacaaaatccaccgtctccatcttaatctcaaactcaacccggtccctcctccgtaccacaacacgataaaccccacaaaccaaatccccaacctcaaaatccagcgcggcaagatatcccgtcttaaaactctgcttctgttccggcttcttgctagccatagcaagcatgagcgcctgcgggaaccgcgagaaagcggtcatattgcggcgcacgagtcttttaaagagcaggtctgtggcctcactgctagggaggcaggcccgcgggactgactctgaggcgtggtcgtagattgtgaagtactcatcactaaagacggtttccgggattgattctatacttggttttgtggatgcggtgagggttccaaggtgggacttgtgcgctatgcgttttgataggcgttcgtggaagatgtagaagtagattgccgacgagctggttattatcgcggttgccgtaaggatgaggcggatcattttggtttttcttgaggctgtgagatgtctacaactggggttttgttgcgaaaaaagtgatgcgatcatcggatacgaggtcggcttggcgcgtcatctgtccctacgtcttatcaccagatcgtccagttcaatgatttccatatgaaatcgtcatgttaaatcgtaaatcggtcaggtctgtgatcacatcgaaaagaaactaagttgaaaacgcgcaacgccaacccaacccagccccaaccaaacacagtggtatactttgagaagatgaaaaaaaaaacacagcgaagtaaacaaaccctcacttccttgcctcattcttcaaaacatttacacggccactattatgccatttcgcaagcttaacaccacacttaccacaagaatgctcgacatccttaagcgaggacatcaagtaagggatacagccgagacagcaacaaaagcaaagaatagcagcccagccactataccaaaatgaaaagaagatcaactaccaatccaatatttcaactatacacggaaatccaacttactgcgtagtcccaccgctcacagactcaacactggtcatctcccgttctccacaaacaggacagtcaaccggataaggtgcagactggacacagtgcagcggtatggccgtagcatacccactaggatggctggaaggcatgtagaactgctgtgggtagcccggcccctgctgtagctgtgcttgtatgtgcgggtactggggcaggggctggcctgcgtatgccttgtcgagcggagcagtcgttgatggcgacgcatcgtatgcgggtgattggctggtggagtcaggtcgataggggtagtgttgttctgaggggccgtttattgttgttggggcgtagctggagcgtagggcgtctgagagggactgcccagtgtgtgaatatgtgtctgagtgtgggcttacagggcctcggttttgatggtctgagaaaacgacttctggatcttcgcaatatacgggggctggtgctggaggttgttaattatttcgtgctatatgagaatatgatggggggctcatagcgtactaggcgtcgactcggggtgttctgtgtatcctggcattgttgtagagtctgggggtctggagacagacagtttgatggggatacaagaaatttcacttgtttgaatggttttaagtgaaatctaacagcgcttgcgaatgtaacaagataaatgataaaaaatagagcggtcgatatgatcgtcaagggctaatatgtaagatgtaagtattacagtggatacctggggattccatgagtgcactgccttgaacagggttataagatatcaagcctaagccacgcaagtgaagcttgcagtatcacatagccagaagactaagagaaagccgtcgggttggtctgtcgatctcgcttttgactcatccgtgcatgaacagggattatctacagaaaaggctgttgatagataggtatgcggcttattttgcgaccaatctatatttggatcggtctacatgaaggggctagagataattcaattcatcataagccggttgatgctagcatatcgcagctcaattctattccgtacatattataccaagccccaacaataattcaaataaaaatccagcccatttacactggcggttataacattattacaccccgacgatcgtaaacgcaaacctgatcacacgggttgtggccgatcaatgcctgtctgagcctttgaaggctgagtaggcctatacgcaaatgctccttagtttctcgatctttggcccccaactactatttggaatacactatattaattgcgcataggcgtattgtaatataaagtgagatatatacatagataaggctacatgaaacaagatatagatgtacaatcactccaaaacatggcctactaaagacctaaagccgaaccgaaaaagatataaatcgatttacgctaggtgccagatgttatacgcagactcatagacccccaagccattagaaatattgatatcgaaccggtccccctcccccaggataatacccatactgcgcaaaaacccccagaatctcactcctctgcattatccccgcgtaagccacaaccgtctccgtccgacgaatcccgcctttaacatacggatccgccccgcgctccatcaaaagcctaaccatctccaggacattcgactgaacagccttatacaatggcgtctgccaaggataccgcataagatcgaccgccgcaccacgatcaagcaacaacctcgcaaccctcatattcccattcaacgccgccagcgccaacgccgtatcccccgtactattaacagcattaatatcagccccgcagtccagcaacatctccacaatccgatcctgtccatacgcggcagcctgcgagagcgccgtctcgcccgtccccttacccgcattgatattcgcgcctgaggcaatcagcatccgcaagatgcggtcgaagccgcgcgctgcggcgacgccgagtgctgtttcgcctttcagagcccgtacgttcatgtctgcgccgtattctagtagaaggcgggttgtggcttcgtggccgaaggaaacggcggccattagggctgttgtgccatcggtgttttgggcgttggcatcggcgcctttggagaggagggtttgcacggtttggtgttggttggcttttatggcgactatgaagggttctcttgagctggtcatttcccatagaatgcggctcattcggcggggcttttttgagtgtgtggaaactctgaaggcgtggaggtctagtgagggttttggctgggtaggttctgtcactggtattggggggttcatgtcgttatcttgattgttctctgtaagaaccgggatggggaagtcttcgactggtaacgcttctttctgtgtatctgtgcaatcttgcatgtccaacgtcactggtattgggaagttttcttctcgtattgtctctttttcaggatatggctgctcctggattgaatatgagctgcgcttgtctgaaaatgagaaaccttttggcgggagcgggagaaatgggaggccagttggctcgtctgctagccaatccttgtcgtctaggcttctctgacgttctaattccagagtttttgatagtgccgtagattcaaggacttcctctaccggagccgtgttttctctgtgaacaggcagaaggccatatgtctctgctgtcttttgaaaagtcgagataacgaagtcccggttcagagtcaacaaatccgaagcaataccagtagcgaccaactcttcctgtaactgaggccagattctgtcttcctcaagcttcgaggaatccttcaaaatatcagaaatagccaaggcctcctttgtgccagcacgaatgtcatcgataaagcacctcagtgcgcgctcaattatcttctgggatgatctgtatcaatgttaaaatccacactgacccacacacgaacataacaaacacacatcatcatattcagattcacctcggtaagcccgaaaataaccgaagagagccgcgcgcgaatgtcagaaaccagactctgagccccgagcgcatctggatgtagaagcagcttctgcaattctagcaggacaacatggcagctgtacaatctttttttcaaaactgcgagatggacgcattccgcccctagagaggaagtatacgcctcggtcgcgcttagtacggtcagaagcaggccgagctcattttgggcctggttcgttagggccattgacacgcgcgttgactcatacagggagtcagctaatagtcggattgcggtagtttggtgccatggttgactgcctgcttgtagagacatggtgctgggctttgagatagtcaatgggactaggccttgcggagtgctgggtgcgataccaggggccatctggagagggcccgtgcagcatcgccccatttttggcctccttcttggggttcgattctatttttggagattatttcaaggtagacgatgtgatatgttattattaaatgaaatgagaagtaaagagagttagactcaatttaagaatgatcagggaatagagtagactagatcaaatccatgtgtgtagcctgcgagggattacaacctcgacattcatctcataaagatcctctaaattaggatactctttggttgatagacattggagatcgagaattcgaaacacacaactacatctacttaatgttactagtctacaatgaaagataagtcaaacagataaacatggtctattcaataacaacaaagcaagcagggaaaccaaaagaatttcacgggcgagaatggctttgaaggcaaacacagggacccatatccagaggcagcggctcactagagagcaagatggtactgggacgaatatcatccaaatccgaagctacaataaagtcaacgctcgcctgtggctctgcggacatctcgtcagcttcaaggtcagcaatggctttcgtcaagggtgccatgatgcggtcacaacacaagcgctcgaactcagccgagaagtggtttgcaggtctattacggacggtgcgacaacgcggacatgcccgtgccatctcttcacccaggacaaagatggcctcgagcagccgcgccaatttgtagagcactggaatgacttcggggcggaggccgtctccaagtccaaggaaccggaactcttcgaatagagtggacttgaagcaggcgcatgcggtgaggaatcgcttttcgtagttcatcctgtcggcctcttctgtgcctaggtatctatttgagctcacgttgactatctgcggcgaagaatagactggggcttgcttagatgtaggtatgctcacctcgagtcttgcgtgattgtagatgataggagggatagcttggacagatgggaaaatcctatttatgctttttcagttgacgttgactggtttcagacaaagactttgatgattgtacttgacaaagggatagaagccatgtactttataaatcctttgtggaattttgagacaagtagtcaaaggcgggcgcattatctttggcgcaccaaattcactcagttcaaattcaatacccagcccttattgggaccaagacccctatgcatgtagagtagattgtagcgccttcataacactagtttacctagaaggtatatccctcttcccataccgtagctatgccctacatgccatcacattgagttaactagataaatctagaagtggcgacatgttttgtctcataaaggacatatttcctgattgagactccttaaggtttgattccttcaaccacttccattatatcaccaaaagctctttctaggctctttgaaacttgcatatatccaatttgcaatgagtgttaggtcatctcggtcgctattagagcaaattcctgccaaaatcgccaaacgatagagaagtctagtacaaagaggcccacgtcttcttgttgctagcaattagtcatggcacacttgatcacgcacagagcaatcatatgcctgatctttcctctcgatcaggtcacccctaatcaggagccatatactatacatgccaaagagactgtggtgagctaccttatctacggattccttgcctagacgagatccctgacgcaaacaatcgcagttctagccaagtgaaggctgtccagcatagatcgggtacctgcacgatattgtgtgactcttgacatactctcccggtgtgaaaagatgatcgacggaaaagtgtccgaatagatacctagcttccaaggcatttcagaatttgccactataccaccaagaaagctaaaggtgatatgctacgggacatggttgctatagacaagtgtgttcttcgcctgaaaacagcttacctgcggatccgttcccgtcgctccacatccccactggagctcgaagaagtctcaagtctgttgcaactatttagtatagctttgttcaaaaacagactgaaataggaagaaaaaagaaatccacttaaaatctcaagaaaaaaaccgcaaaatgacaaagcgttgaggggttgatgtcacatgttgagaaccccccgctaggtttccttgatctggaactctccccatcttctctccacctctccagctctccgcaccagacatgtcttctaccattgacagctcaaatattcccactgatggcacaggtaaactcaaaattactagagctttcattacagttctcattctaacaaaaaaaaaataggtgttatccaactggatccttggttggaaccgtaccgtgatgtcttgaaacacagataccaggtggtcgaggaatggaccaagaccatcaatgaaacagagggcagcttggacaagttcagcaaggtgaattcatctccattgatcgatgtcctctgtgctaatgagtttatcagggctacgaaaccttcggactgcatgcacaacccaacggagagatcaaataccaagaatgggcacccaacgccaaggaggcttctttagtcggtgattttagtacgttgtgtgctagccatatttgaggagcttgactgagactggcagacaactgggacgtcaatgccaaccccatgacgaagaacagcttcggcatctgggatgtaacggtaccagcgaagaatggcgctcccgctattccccacgagagcaagatcaaggtaagaatatctgccccgaatatcagcacggcacccactaagaatccgatagatcacaatggtgctccccagcggcgagcgcatctaccggatccccgcttggatcaagcgcgtggtccaagacctgagcgtatcgcctgcatacgatgccgttttctggaacccgcccgcggatgaggtatacaagttccagtacccgcggcccaagaagccggaggatctacgcatttacgaggcgcacgtcggcatctcgtcgccagagactagggtcgctacatacaaggagtttacgaaaaacatgctgccccgcattcagtatctgggatacaatgcaatccagctaatggccatcatggagcatgcgtactatgctagcttcgggtaccaggtaaacaacttcttcgcggcgagcagtcgctacggatccccagaggatctgaaggagcttgttgataccgcacacgagatggggctgattgtgcttcttgatgtggttcatagccatgcctccaaaaacgtcgttgatggactcaatgagttcgatggaaccgatcacctctacttccatggcggcgcgaagggccgtcatgagctgtgggacagtcgtctgttcaattatggaagccacgaagtgttgcgtttccttttgagtaatctgcgtttctggatggaagagtatcaattcgatggataccgcttcgatggtgtgaccagcatgctctatacgcaccatggtatcggaacgtatgttcattttcctactatttctttagaaagtcccgctaaccgaaagaaacagtggattttctggtgggtaccatgagtacttcgggccaggcgttgacgaggagggcgtcacatacctcaccctcgccaaccagatgctgcacgaactctacccagactgtatcacagtcgcagaagatgtctccggcatgcccgcactgtgtctacctcatgcactaggcggtgctggcttcgactaccgtctcgcgatggctatcccagacatgtggatcaagcttctgaaggaaagcactgacgacgaatgggacatggccaacatcgccttcacgctcaccaaccggcgccatggtgagaaaaccattgcctacgccgagagccatgaccaagcgtaagttcaatcccccatctccaaattccaattatccaaccaactaacacacactcgcagcctcgtcggagacaagacccttatgatgtggctctgcgacaaagagatgtacacacacatgtccacgctaacggagttcacccccgtgatcgagcgcggcatggcgctgcacaagatgatccgcctagtaacccacgctctcggcggcgaaggctacctaaacttcgaaggcaacgaattcggacacccagaatggctggacttccctcgcgccggcaacgacaactctttctggtacgcgcgacgccagctaaatctcaccgaagaccctctgctgcggtacaacttcctgaaccagttcgaccgcgggatgcagctggccgagaagaagtacaagtggctctcttcgccgcaggcatacatcagtctgaagaacgagagtgacaaggtccttgtcttcgagcgggctggactactttggatcttcaatttcaattccaagaagagcttcaccgattaccgcgttggcattcaggttcccggtacataccggattattcttgatacggatgatacggcatttggtgggcttgggcggaatgttaaggagacgcgcttcttcactactgatatggagtggaatgggagggcgaatttcgtgcaggtttatattcctacgaggactgctttggtatgtgtctgacccttttcccgtctgtcctttgactggtttgctgacttttctgtgttcctcgcaggtcctggctctggaaaatactctgtaatgtgaacgccaatccatgtctgtgtcctgcacgcagcagagtccgaaattgaacatcttagtcctagtgttagcgtgatttgacctagtttcttcagtgtgatgtcctgcattttgtttctaactacggctatgtgtctagcaacgttttatatcatatacactcttttgaaagcattatacattgtcgcctcaacagacagagcgtgaaggaagatagtggtgcacggtttccgaaggtaataggaagatcaccttcagagaaataagtttcagtgcagaggcaccatataactagacaaaaagcagctagatataaaccacccgaatgatcgagggactacctgtatagggatgaacgcacctatctctaaccattcaactacaccactatacaaaatacgcaggaccaagaaggcaatcacaaaggaaaagatgtcgagaatcaggttttgaactctaaatacacaaaataatgaaacatgccggtctaggggggtgggttgtgtaaggtatctccaatctagaccggctttaaaatcccatcaagtcgctaagatagacgaacgcatcacgaacctctccccaaccaccgacaaaaactcacaacctcttcaacctcaatttccaaaccacgattctgccgtcggtagatcccagacatttcagattcccttgctcgggttcctttcggatcgagtctagacagaacgacaccagggagttccaacattgacgcgacaaccatgcagtggaaatggaagtgaaatcaaatccctttcttgttgcatttgttttctctcttagatcgggtaatgtacactgtggtaatatacacgcctcgaaaaagggaaatgatgttgtcgcgtacaacgttggaacactttgagtgttctgacaaagggaattaaatgaaaccgagagaaccaatagagaataggtgagggaaaagaggaaaagaagaggaagagcttgaaggtggagggggaagttaagacggcgctagctagcaaatgacaaaattacatttaggccttgttctcaagctcagccaggatcttctcacccttggcacgggcagcgttcatgtcgccaaccatgtagaaggcggcctcggggaggtcgtcaccctcaccagcaatgatggccttgaaggaggagatggtgtccttcaagtcaacaagggtaccctcgataccagtgaaaacctgggcgacggcgaagggctgggacaggaaacgctggagcttacgggcacgctcgacagtgagcttatcagcctcggacaactcatccataccgagaatggcaatgatatcctggagggacttgtactcctggagcatctgctggacacggctggcggtgttgtagtggtcgtcaccgatgatacgggggtcgagcatacgggacttggagtcgaggggatcgacagcggggtagatacccaactcggagataccacgagacaacacagtggtggcgtccaagtgagcgaaggtggtagcgggggcaggatcagtcaaatcgtcagcgggcacgtagacggcctggacggaggtgatggaacccttgtgggtggtggtaatacgctcctgcatcatacccatgtcaacagccagggtaggctggtaaccgacggcagaggggatacgacccaaaagggcagacacctcggaaccggcctgggtgaaacggaaaatgttgtcaatgaagagcagcacgtcctgaccctcctcgtcacggaagtactcggcaatggtcaaaccagtcagggcaacacgggcacgggcaccggggggctcgttcatctgaccgaacacaagggcgaccttggagggaccatcgagctggatgacaccggtctcctgcatctcgtggtacagatcgttaccctcacgggtacgctcaccgacaccacagaacacggagtaaccaccgtgggccttggcgatgttgttctaaaaattgcaagtataagcatttaatgcggatttcaagagatgggggatagaggaaatccttacaatcaactcctggatgaacacggtcttaccgacaccggcaccaccgaacagaccaatcttaccaccacgggcgtagggggcgagcaagtcgacaaccttgataccggtgacgagaatctcggcagaggtggactggtcgacgaacgcgggagcatcggcgtggatgggagcgaacttggtggccttgacgggaccacgctcgtcaatggggtcaccagtgacgttgatgatacgaccgagagtggcgggaccgacggggatggtgatgggggcaccagtatcctcggcggtgacaccacgggagagaccctcggtaccttcagatgacgttagtgaaagctccaatttacggttggaccacactcgatcaattcccccgatcgggtagggaacgacacggtggcccaagaaaggggtgggaaggggtgaagcttaccgtccatggcaatagtacggacgacattctcacccaagtgttgctaaaagcaattgttagctttgttgcgatttgaatcaaggttcagccaatcagatcacgtacagcaacctccagaacgagcttctggccgttgttggtggtggtcagggcgttgtaaatggcagggagcttctctccgctgaacttcactgtaagatggcgaatataaagtcagaaacggtttcgttgatgattttggggttgattgcgatggtttcggtgatggattgggtccagggaaaagattttcgcgaggtgcccgttccgtcaggagtcgataacacgtaccgtcaacgacggcaccaatgacctggtgaacctttccagtcaagagagcatcggagctagcgaagcgggcagtgatagccgggagagcattggaacggacaggctggaaagcgcgggcgacgggggtcgtccgggcaaaagcagccctcccaaaggaccgggcgagaccgctagagagattataaaattagtttccaaatgaaaaagacaggaagattcaatggatcctaaaaccatacctcttgaacataatgactgtgttgaagagcgagatgtggtgaaaggaagaggtgaggttggaacgggaaaagagggaagaagaggaagggaagaggttggtggatggggactggtcgcccttagcctttccggggcggttttgccgacgatcccgtgatgaaccgagcaccaacttgagctatctacagggaaaagagcttgattttctgatttagaatggttttttatatataaatcatgctctctcttatttttaaatatccattgccactagtatggtgtggtgaagtggtgaccgaggaagctcagcccgttgccctggaattcgcgcacacacaccgggtcttggcggccgggtgcaggggagccacggcttttggctcaatgacatcgttgccccggagaaatcttcgagatattgaaaacattgtcccttaggctggcggtgaaagggtgaaactagaaaaagatatcacgaaagtcaatggccctttggtccgaatatcggaaaaactctgacgtgtgccaattccgggtcaaaacatcgaacatataaaaacgtatgcactaaattagattccaagctaagattgttatgttcgttatattcagatggtttataatcttcattcctatttatatcctctttgcatttcatatctccatagaaactaacccgtattcttctgttactatcggaaccaccgtgttcccgcagggattctccgcacttgcgttggttccgaatcactccgtagaccacgccatgtcggagcgcaggggcatacacgtagatcgtttatcctagagttacgtccatatcaaactcatgttctatggctacaaaagagatacattgattatagcacagtacgagatacacgcattttccaatgcttgccaaaaaaagatagaatggggaacagtcgacgcgcgcacgggcggaggcccatcctccgatacaaagacatgtcgaacatctatggaaagagtagcttgcaataaaatcgacatccaggtcgtgcgacggatgccgccgtccgtcttgcgtagatatcaagtcactcccggtcgggtaactagaacacctatgacttctcagcggggccgctctggacaaagcccttgccttcgtagccctctttgctgatgccgtggatggggttaatcttctctttctgtagtcgaataggttagcatcgtccaatttgaccgaggcagagacttctcccgactgctgtcggaaggggcgtgagatacataccagggcatattcattggaggcctcctgccactccttggacatggtaccgggctgcttgccggcaaaggagtggacggtgtagaagatggcaacggaggcggcagtgagctggagcaccttgaagaagacgcgcaagccctcacccttgggggcctgggcacgagggccgtgggcgccgaaggcaatgtagtaagctagagcagaggaagaattgatgtcagtgaaaaacgattacttgcaaagataatcatggacgagggatcaggtgcatcccgtcatagataaccgcggaagcctcaggatagtcgaagcaagaggccgtctttcaagccaacacattctaggggtagtacgtaccggccttcttctcctggagggtcaactggtgccagtcgaccttcatacggtcacggagctgcatccagagctcggcctgctcctgagggggcatgccctcccagcgcttctcgatgttggcgagggtagggttggggatagcatggtccgaggcagcgcgggtctgcagggcgttcacagaggcagtcggggcagcacggaaggccgcggtgctgcgagggacagcgcgagagacggtgcgaagaaacattgtgcggcaggcgggaggtgggaggaccacgtcggaatcggtttcaattgatgtaattagacggaggtcgggagttggaaagccagagagcacgcctgggcacggcttaggagtgagtggaggagaatcgtggatggggaatgacttgaagacgtttcttgtggtttgaggtggaaaggcgaggatccggtcgggactagtgcggttttggtttggctgcctcctcattggctcctggcccaaatcggctgtccctgccagtgagcatcatcaccattctcagccatgtggcatgatgttgatattcttcaagtgcttatggacttttttttatttcgacggttattatgcctctattcgcaaggttccccagtgtcaaccagtcgctcaagtctttaggccatcgtcggaatctttagccgcatttaaactagcccagtcatgcagtagctttcgcaggaaaagccaggagttgtccagttgcctaactattctacattcaacaccatgcatcctgagatcttctcgtccgccacgtgcaatataaccgacaggcagcaagattcggtgcccaattgcccaagtacctcaacttgaagtaaaaatcattcagaacggaacaagctgagagtaaatcaagactcctcagacctctcgcaaaatggtacaaacacgggccaagtcgtaacggtcttgcattgcaactaagaagaaaatgggagaacggtgtgcaggaaaggtaatgaattgatcgttccgcggcgccgtcaagggcgcacccatatcagtcgcgcagcccggatccagccggcgctatcatctatgccttgccaccactggcctccttcaggactgtcttccactcgatatcggacttgtcatcggcgtggatggaagtgacgacgttgagggcgttcttgagaacctcgcgggtgctggcgtagatcatggaccactgaaaatgaaattagctattggttctgcacatgggttgaagcctgggtctggggaaatcttacgagagtgggggtctcgctaggcacccaggagatgaagataatcttgcttctgtgagaacaatcaggtcagcgggaggcctgagaacaattgcgaatatcagaatgcgcacctcttgccctcgccggcaatctcgtactcgacatcgtagacggcgtaacggggggaggcgcggccctggctgtctttggcatcggcgagctcgttgcggaagacctcgtagtcctggtccttgccgactgagtctacgacaaccgacttcttgtcgtcggcgatcttgtagatgatgtacttggtcttgccgtggcttcggctgaagtcctggaaggtggtgatacagtcatcctggatctggacactgtagggggcaggtgtcaataaatagtgaaagtgaggggaaaccagttgcgagcgcgggaaccgacgacgacttacccggatgcgagctgcgcgatatcatagtcagtattgagtgttgtatatcataaggttagaggtcaatacgaaccgacatgatggcttatgtagatgagaaagacaaaaaaaggacgggctgtctagcgctatgtcagtggctgagataaccaaactcagggggtctttcgagcttctcggattggcatgagaagtcaaagtagtatgcactccaattacttacagggattgaaggaggcggggatcgagacaacggagacggatgagacggggaagatggagtttgaggggtgaattgtttcccaggtgttgccatggccatagtgggggtggctgcacgtgatatcagacttttgataattaaagtgctcggtacctgtttacaagttgaatgacgtgtaaagaattgatctaatatagtttgtttttaagacttctaaggtatatgaggctgtttggagtttcgacttgaaaaatgacatatagtgtcagatatgttgaagcatcgaacaatatttgtgttctcacgaggtttttgctttttcatcctcgaagtaccaggtactccaaggattatgtacattaagatttataatcacgccatcttagcctatagctgcatatgtacggggtacggagtacataagacgttggatgtgagcctccccaatgtgggtgtctgcgagctaaaattggccagccttcaaccatgggacaacgtcagtggctaattttgccttggcccaccatatctactgtggtttatgcaatacaatatattgacaagctagatttactgcgtctgcctacatattgttcttttattgcttgactacggtgtggatatagcttgacaagtgtgagcgtttaacttcataaccaaaatatatattgtaaatatgcatagcggatctatatattcagacatataattgtcacgcataataacgactgatgtccatcaaggagtttagtgagctgcaggagaattctcttccttcagaaaactgaaatggtctacttcaatgtaggaaatgaatccacaagagagtgatgatattgtaagactagctctgccctcagcggcaaaaaaaaaagagaagagatacaagactcctcccatctgtcgatattgtaaaaagaagagccttgccctcggcgataagaaaaaaaaaaaagagacatatgacccctcccatctgtcgatttttatgcttccactagtagtgcgaggctggtcatcgcaagaaggtcttccacatcggtgcttccgctcggggcaagcccaccacagtcttcaaaatccctgagggtcttatcgattacttctgcctggccgctcatgtgcagaaagtttccgatgcaagcgtgtatttggagaagtctcggatctggaagttcccaacttccgttatgaactttgaaattgacaatccgatccttaggcaaaaaaaagattggccctgtaagggtatccggaaaggtcttgatatgatactggtggggaatttcagttgcttcgaaaataagtcggaattgaccaaattccctgtgaatttgggagtctagcatcatgacgttattatctgaattgatctgttccggggcaaatgacatattccgaagaactgggaagtagcgtcttagattaacccaaatcactgcatttctgtgtactatgctgcgggcattggcttaaaaggatccaagtgagaatggaatgatgtgggcggcttcaagatatgttgttaatgtatcttgtggataggggtaggcttgactgtatttatttgttgcaagacatttgtaactatctctttctaaacagtggcgccggagttgcgactgggagtttccattgatgggctcgatatctagacttttgagattttcgattgactcttcgaggtcagggcgcggagacggagtgacttcagtaggtgttttaccaccctgtgatttcaatggaatcaataacccggttttgatgctttgtactagttgccgaagcttttcgtcgtctgaacaccctaaaatgtccaccgccagatttgcttttccgtcaggaggaaggacctcgaggaagtcactgaggaagtccttggttttatctgtgggtttaagtggtttgtagctgttcagctttcgatccgttttctagcttgattgtgagtatcaaagactagaaggcataagagactaaccgtctggaatgatggcattccgcccattatctaggttagggtacgcttgagggtagtctagaaagtatggaagttctagtagaagcaaggtggccgaatcagttgtgacacttgagacggggattgatgattgcggaatgaagcgaaacaattagaatcaacgcggtgaaatgtcatcggctaactttggcagaataatccaaccggcagaataaatatagactaggcttaatctggctagacgatactttctatcagtaaaacccggttgtaacgaattgaatcagacacgggtttgaattcgttatatccaggtcttcgttaaatccagaacccatatatcagatatatatttctagatcacatacagatttatgctccaaaaaggccctgatctttctttgcttcctctactatattttcctcgcttctaccaaccttttatacttatgaaacgtactaattagtcgtgattcaccctactcctgctactctttataaaaatgaaggggtttcaaagcctgaatagccttacgatataggtccttagcctcttctgtaacgatctcatcctggaacgaattcactaaatgtaggaaaggatcctagagattattaaaggagagggtcaatggttatatgctttataaagccattaagcaagctctttactaggtggtaaacagaagggtcgacgttctgggaggttacactgcaacgagtatctgatggactctggccgtcgagatccctaggcgtaagaagagcatggagcagactaagtgatcacataactgcactgtagccaaattcatttctcattcttcgttccataggcaacataaaaaagacagcctaagtatgtagatatgtcaaaccccaaccctaggtacatacatctaaactgtaaccggataactaaaccttcggcgccggcgcaaacttggccctcatcttatccgcaacaagcttctcatcataaatgaagttaacactgtcatgcgcaaccgtcgcctcagcccagcgcttaaacctcggagcctgctctagcaaagcgggcaacttagccgaaacaagaccatgttcaggcttggcgaagctcaaaatcctcaacaagaacgagcccgcctgaacctccgccagggtcagtttctcactaccaccaaagaacggacccttgccctccgtgtctgccaggagtggctcaacctccttcacgacagcagcgaccagctgctcggcggcggcatcgcgctcggtctcatcagcggagcggatactggcaaagaaagaaggcaggactttgctgaagaaggcgtcgacgaagaaagagagacgcgcgcggtagatggcgttctcggttggcgaggacggtgggaggagatggctttggtgcgcatctgcgaggaattgggcgacaatgccggattcggctatgatggttccgttataggagatggtgggaacgaggccgcgctgttggaggtggctgttagtaaacagtttatagtatacgaggcgtagtatgaagtgtaggtgtatagataaggagtgggtgtcggaagagcgcttgtcacttactgggttgatcttcaaataccatggctcgcgcggggtgtttaggtcgatggtgacttcctcatagtcgaggccgagttccttgagggcgatatgcgcgcggtgggcccaggggcagacgcggttcgtgtagagaatgatctttggggcggacatgatggattgatgtgtgatgcacaggaggaatagaacttagaggagtagagcttagagaaggaagttatagtgaggaagacacgccattataaaagacattgcgaaatgaggggttggattagtaaaatgcaattgttaatcaatcgcgaaatcgagggattgactccgttaactccgttcccggataagaattgagcagaggtgggggattcggagagaaatgtctgacaaactcttggggcttaataatggagaaatgattcaccttaattgaggtctagctttgttaaaattggtctaaatatgtacatacattaaagcgtccactatatgtgtccgatatctgaccaaaccaccttcggcggcgctcagttatcagggtatagaaatggtctcaagtggcaaaccgatgtgtagtacgtaaaaagactggagatgtgccctaggagtaaagagcacatctgagtccgatgcgccagcgaccggttccacacgaatcaagtggaagaaagataatgagaaaatgtcaaactaaggaaaagacgagatgaccgtcataaaagggggtatatcgaatacgagtataaaatgagcattgagccgattgttgagatgttcggggaggacggccagccggggcgtaaaaagcactggaagggatcaacacgctgtcgtcaggacgtaattttgcatgaaaactgaaaattgagaaccgtgctcaagcttcctcgtcttcctggccgccatcgatgatcttgtgccagtgctgtggtagacagatacagaccagggggaaagccttgatctcgccggacggcaagggcgacggcatacccgagccactcgagacaccactgtcgcggtgttcgcggtaattcatgccttggtcctcggcacgttcggggagtcgcacacccgtcgcccagccatcgtcccagatgccaatcaccctcaacatctcgcctcggtcaagttcgaattcgtcgcccgctcgtggtgagtatgcccaaaggacggcaaccttgtcgccagcgtgaatctcatcttgagagtagtagtcccggaaataagacagctgctcagatcgaccactggtaactgcttcgggggaagagtatgggttcgtcgggccggagcgaggcgagctgtcgctttctagtccagccagaactgagttgctagagagtgagccgtgacgtttcccggtcaccggtgggattcgcttggacatagctcctggactggcgcccatgccttctgagtctgacgtgtcgctgtacttggccccgccgccgtacatcgccgcggaggtacgcgaataagcgggcgatgattcactgggcatttcgcgcaatgcagacatccgcgtgactcggcctcccgggaccatgttgtacgatgtcgggcttgggggctgctgcattgaaagcgatccgccctttctttgtgggtttggttggttgagcgcagcttcattccgtgtctcacgacggcggcggcgcgtgagaatacaaaaggcgaggagagcacctagaatggcggctcccacgacggagccaactacgatcccagcaattgcgccgcccgacaagccatggctagaatctgcgacggcggaaggtgagggcgtaagagggggtagagtaacagtcggtactgagacaccgtcacagcgactcgtggcattggatttcgtacagcaactatcggtgccattcgcgcaaaatgtgcagagaccaatggtatttgtcgcaaagccacagttgtcaggctcattcgcagctcctttgacacaatctccagaaagggcgtcggatggtttttcgcagatggtcaactcggcatagattaggtccgtgtagttcttgtcgctcgtggcgcataagtctgtatttgccatggtctcctgttcactccgggcccaaagtgcgcatgtgtcgacgcaaattggtatcgagtcgtttgtggaaagtttgcagtcggatatggagctttgcacgacactgctgcacaaaacactggttgtatactgggcatagtagttattgggggcacttgaattgatgccctggcatcccagtaagtcaacatatctgggagctcctgttagtgactcttctcccgatccattggtggcagcacatacttcatcgaaacatatgacccaaggacatagtcctttaatgaattatcgaaatccgtcagattcgacacacctttaaggaaagggctagcagcgcactgtcagcaattgttcttttttttaagcgcgcgtttccactcacaagtccgcatatagactggaactggttgaaatggacgagctatcccaggcaggacaggcacttgaccccgagagggaaatgcaagagctcgacatgccgggcagaatcggcggtctggtctcaaatagacccctttgggttatcgacgcggaatgtgtcaattgcgatcgagaatgttccaggcgttgtcgcgaatcgcacggatattcgaattgggagaattgaataaattgttcgaccccaggtcggaactgtctcgagctcgagaagaagaaaaacgcgtgaaaggtaaacgagtgactcggggttctcaatgcccggaaggaaaggtcaaccgagccccgtaggcctaaatttgaaatgagagaaagagatgacaagacgaagttctaagattggaaagacaaggttagaccttcaagatggtctgggcttgtgggtaacaaggggatgagctgggaaaaagggcaattatgaaacacggagaacaggcataatcggctgtacagattcaggcacgctaaactcaatattggctacactctgtgtactccatggagacgggttggacgcagtatagaagacaattgataaaagggggtgggggggaaaggaagttgtgccgtgttgtttacctttctctttattctgtggactctttttgggtatcaaaacgcaattgggactaaaattctacagacgtacgacatatggtgtactaatactaaacacaatgacaacggttatcttagagtcaactataattggcaatgtctgctgtcaatttctgaccggttgctctgttcatcaccagcctcgctagtgacccgttagcggcttagacaagacgatcactatcgcctcgagaatactatgaccagggtccggagcttaatattaatttcccgaatttcccttgcatcatgcacacaatttggcaatagatgtagcacatttcaacgttgtatgtgagctatcggctgaggatgcgagggaccgaattggacttggtacggaatatggagtacagggtacccaatcacaagcagtaagcagccggcagttgcatgtaccaggtacttacaagcatagtactccgtataacctatgtgttaatcaatccccccgcttgggcagatagttatatgacaagtctgttcctatagacagttagtaaatatacctataccttactttcaagtagagggaagtgtatatcatctaaagtcaggcggagtacaatgtagggcaacgaattacagaggtcatgtgaccattgacatcatctgatctggaggctgccgtcagacaatctgcgactcgtcggtggaaaacctttaaccattgccaacacattcccagtgtactcgataacaactcacactttctatcagatctcagagaccctgcgagccatgtgcagctccgaccttttcctagcggtactcgccgtctttttcccacctattgcaggtaacttttaaacccgcagacccgcacgccaacacacctacacttggtccaatgctaaccaaacccccgcatcaacagtctgggtcaaggccgggttctgcagtgcagactcgttcatcaacataactctcaccctactctgcttcttcccgggtctcatccacgcgtggtacatcatcctcaagtacccggagcaatacgacgacgatgtagcctacgagcccatccccggaggcgggagtcggcggcgcgatctggagaacggaaacgttacctactactacgtctcacgacagccccagcgcggatatggcacagtcgacactcaagaccagcaggcgcctggtccggcgaacaaaccacacaaccagactgaagcaagtggaaatgctgggagcagcagtgcgcccccaccaccgacttatgctgaggctgtgaagggtgacaataagctgcagagcaatgaacgagagtgagcactgactcgttggctttgcttgggtggcgtcctcggcttcccatcgtctcatcggtcacctatttcccgacccggttgtgttgtccataccctttcgcttcactgtttttgtacacgcacttcttgagaactgcatcgttatgttatgactttgacgaaggaacgttctatgtaattctgacttttgattttgttcattgcttgcgtatcttctttgattatatgttatttgcgggatactataccagtactttttatccttacctcggaggcacttagtaccaactgggcttttggtttgataactcctatcttgtaggtattattctcaatcttaatatagatcttcttgatttgagcttctaccacgcattggcaaatcgttagtggatacaatgagatcctgctttagtagccagtgggtgctctcatttcgggaggtggctatcttattgagatgaaggtattgtgaggtatggatgtgtaggaacttctctgggcactcgtatagccactcatattgtatataccccagaatggattggaagattggatcagcgtatcggtcctggaaggctgtccatctctcagtgaaactgtcaaccttctcgcgtaattcctttgctttctgggactttgtgttgcgttgagaagccagggaggcggtgaactgagggcttcttgttgctgagccttagtgagctgttccgatagaatcggccaggcgttcttcatgatgcaaatattgatataccagatacaaagcatgttctttgcctttgcgttcggggactagatggttggtcaaatagaggaccgttgatgatcgagctgacggcatcaaaaacatcagcacttcgtcattgagaagctccggtatgggccagccctgccgatgcgattcgcattgatccttccagccacgctatatttcagattcttacgagctggcgtgtaaccctgggacatagtgattgtgcctgcttcgtagtcgcggaagacagagcgcagttcaaatactttttaggttatcctagctccttcatgtcgtagtgctgcagtagttagtcaacgacctggtcgatttccttttcagtgggtgcagcgatgatcaacgtgtatcatcatgatacctagtcaagtccatgcaattgtcgcctgttttgatttagatataaggatcgcccccgagaggtcggaacccgatgctatccatttctagaggtatacggtgtctcgaagtccaaagacccaaagagtgtctgccttcggcgtcaaaatattcgaaacctgagggttggcgtatatagaccgtctcggtgttgaggtacgcagccgtaaagtcgacttatatccactatagaacgacacagtgataggtatagtggtatgagggatgtgcactgggctaagaatatatgatgtgaagtaagactgaaggggcccaaaataggcttgacgtctcagcgcgaggtcccataagatgatatagatgcctgtcagggtacggctaagaacgagagatgacatgatatataggagtatcaataagcgaagatgtcaaaagaaaaagaaggacgagatactgaatattgatggtaagtaacattgtccagagcacgagatgagtattaaacaaactctagaaagtcgcttgacaaaggatttatgcctttatagccaggtagttcatatttctttggataacgttttacaaactcatgctgattcataccattcctatgtatatttcctccgcatatggtcgaaaatactgatagcttcaggttttagcgactcgggtgttcatattgacgccaaggtcaactatgcaggacattatgatcataaggcgtatattggaaagacggactgctgttatggttaacgatgggctcgatatgggtttagacttgataaagcctcgaggaaaagggatcgtcggtgcaatggattgacgaggtaggcaatcggagctatggatgtctctcggtagaggggtaaccctgtaaagcccgtttcactaattaatcggaacattaaatgcgattggccaactatatagtacataattaaaacattccaaggctgtattcatagaaaattgctacaatgacctacagcaatctgataagcctatccgaggccaagttccgtcccgaattgatcctcacctagacactctttacaccaccaccacttcctgccacaagcctgtggcctttgttttggccatgcagtctatgccacagctgcttaggcaatcactccgatcaagtctccgactcacaagcccctccccagtgcgagcgcacttccgacctgcattctccgtcagaccgactccgcggagcttctccgcctgtgtacaatgccaattccgccggcagccgagcacatatttggccctcaatgaccgagagaagttctccgcggatacagagaggttaatcagggaaaaagagaaagaactagccgagctggagctcgcctcgcgcgaccctgtcccgatcccgggtctggagtcgggcagctcacttgattcagtacctcctgcggaggacgaacagagtgccgcacaatcgaaaccacaaacaaaggagcatgaaaaagagaagtcagtttcacaggaagaagatgccagtgttggcacgaggagtggaggcctgccatcgtatctggaaagccgtcggtcaaaatggtccaagcaattcagcacagtgatggacaatttgcaatccaatgtttttgtagcaggtcagcgtttaaatgacctgactggatactccagcatcgaagcattgaaaaaagatatccagttctatggtatgtaccatagcaatgcccgaacccgaccccgcgaaacctaagactaatcccacgaaatcatgcagagaaccgactccgcactgcccgagcgaatgtcaagcaagcgaaagaagactacgccgcagcgattaatcgccgatcgacttcccaacgcgaagtaaacgagctcctccaacgcaagcacgcctggtcctcaacagacctggagcgattcaccctcctctaccgcaatgatcacacgaacgaggtcgccgagaccgagacctcccacgctctatcggccgcagagcgcgaagctgaagaggctgccgcacaaatgagcaagagcatcctctcgcgataccacgaggagcaagtctggtccgacaagatccgccgcatgtcgacatggggaacttggggtttgatgggcatgaacgtcctattattccttattttccagatcctcgtggagccgtggcgtcgcaagcgactcgtccagggtttcgaggataaggtcgttgaagcgttggagaaggagaaggccctgaaccgggctatgtttaccgagaacgctgtttcgatcacgccgcggtcgaatgtcactatcctccccgaaattattgattctaccgacgagaacataattgagactgctccttctcttttgattgaaccgaagattaccacgacggagaaagatgcgtccactacggggtccattgtctcggtgaccgacgctactgccgcccagtctctcaagacccgtctctcgaacattacgttgccggttctgtcagtcgagtactggaggcaggtggctagcgagttcttcagtgatcgcagcattgctgtctcccaatacgatctcaccgccgtggctcttcagagtgccgcagctggtgcagctgtgacgggcctactgttcgccctgatcggatctcggtgaaaaaatcatttcattcgggcatgttataattgcattaccagcgagagcgcaccatgtttcgctcatgtttggtcttggcattttgataatgacttggcattttgttgggtggttatatacttgtacatacaattgagaaaaatagataaacagttggatataacccgggaattgaatttagtgtataactactatttgagaattctggcctggaaagcgaccatatatcaaaatagcgaagcattgacgttatttgttgctttcataagagaaccaagcaagcgttgaacaaaggaaataacatgactaggtgatacactaaataaagaacatatgtactcaaggagaccatcggacatcctctgaactcccgagctcgtgtgtttgccatggagaaagatcaagatccaggaagatacggacaaaggaaggaagaggctcattttttgtccatattaaaacacaggtctcttaatcttgacaagacacacggccgctctgtctaaaaaagggaagaaaacacacacacacacacacaagcacatacacagatagataggacatacaatccgtccatcttatatcatccacacttttaatgagactcgcccgttggcggcgatcaaaaaagggtgtattcaaaaattcgcctatccgataatcagggtctcatcctcggggaagctgtaggtgggaacctccaagttcagaggggcagggcccctccgaatacggccggagatatcgtagtgggaaccgtggcaggggcagaaccagccgccgtagtcaccggcctcgccgatggggacacaacccaagtgggtgcagacacctgtagggaggaaggaaagttagaaagttgcgggttgttgttcgccaatcccatgttcacttaccgagcatgacgagccactcgggacgctggacgcggtcctcatcgggctgggggtcacggagagtctcccaattggttgaacgggcctcatcgatctcggcctgggtgcggtgacggatgaagacgggcttaccacgccacttgatgatgacctgttggaatggatgttagatagggatcctgggtaatgggatctgtcggatgaggtggtgaatagaaacacgtacgttcttgccctcagggatggcaccgagagagatctcgaccttagcctgggccaggacatcggcggaggcggacatgttgaccaggaaatctggagagaaagaataacatcagtcgtttgttcaaagtcgcccaaatttccccaattattcaagaatattgttcaattactgtattccatgccatctctttctgattcgaagattccacaaaaacctaccctgaacagtagccttggcaccgacagcggtcgccagaccgagggtgccggccatgaagtaggaaaagacctggttggtgcggggcgagttgttggacttgtacttgctgaagttggggatcttcagggtcgagccgggttcgttagcactggcgaagggggattcgaaagacgacttcgaatcggcgactcccctccgctgctggcaggaggtaacggcggcgcgggagatgggtagctgctgccgagcgacggtgcgcagcagagtgctggaagcggaggagagcgacattgtgagggcaattgaccacggaggggaattgtgccgcgagttgtggagagcgaggtgaggatagagggtggatgaagtcggaagttgaagttggagccagagctttcgctagcgatcggaatcacggggcctgtcattggctgaccggttcccgttcactcccttgacaagaaaacattctacaacttctatactacttgaattcatatctaatgtattctgtgaattgatattgattaattattcatgtttctgctgaaatttgactcgtcaattgtatattatcacattttcttttgttatatctaacccgacccaatgcgaccaaaaccaatgcgcagggaaacccatcattagaaaactccaatgcaaacaacaagattcaagaaaaaaggataatgtagcgcaatcaatcttgcatttccacatcctggtcatgggttgccatgggctcgactgtccggtccgcaatcaacgcactcacagggaccataggccgagaaaccgacggagatgatgtctttgaatcttctttttgtggggtggcatctcccatcactgtgccatttgctggtgtcggaggtgcaattgtaccgttgagagtacgctggcccttctctatggcgccttgattcgccgcatccttcgccttcttctccttgaattgtttgtaagtcgtagtcttgggaatcacgtcggaaaggaactctagattgtcggtgtgtgataccgccgaagctattgtacgttagcatgctgtccgacctcttgctaaccgaggcataggcgtaaccaaccgagatctttatactggacggtcttgcgtggttttcgctccgatttgaccacgttgtgcccttgctcggcaagatattggatgaacatctcctagatctagcattagtcggtgttctcgaggtatttaggtagagggcgcggcatacggtagccattgcgatgacgaaggtcgcgttgttcgagcattgcacgatatcctcatccaactgaatgatcttcttaattcgagcaactatagaaatgtgttggtatgtcaatccaaagtaatagttgtgtctgggacttactcggaagtgcactctgtccggtgatctcatccggctctcccacagtctttggagccatgatgattgattctggcgagataaagtattggcaggacaaatttatacaatttgcagcatgctccagtcaaatattcccgttgtgaaagcaagtgagcgcgagcgtggagtcgagaagagtgaaacgcgtggccgcgttatctaaggaggctctccgttatcgattcaagtgtacttggcgacttcgctttgtcacatcatctactttcaagagcttcattcaccctcgtcccctgaattgtcgcctatagcgcgttaaagtagcaccctagagggatcggacttcgaattcgagagttcctcttctcacatcaaagagcgcggcgtccatcggggacatagacagatcatcgagtcaactctaaatcgactatgctgaccctacctcctcgaccaatgttatgacctctacacgcccctccacgacctttaataggtccctttcagtttcaagagagcggcgcagcccgcgaatgccacccagtcgttctgttccctcccccgtcgaccgacgaggcgattccgacaaccaggaagcacccgccatcccagaagagattagtgggatcaagcgatatgaagattttaccacaatagactgggtccaagatgcagtctatgagcagtcacggcgacgcgcgaaacggcgcagtggcactggattctgggatcaggaaggcatccttggctggagacggaaaatgtacgagtcatacgatgcaggccaggcatggcttgttgttacgcttgtgggcttggcaatcggattaaactcggctgtgctcaatatcatcacggaatggctctctgatattaagctgggccattgtactaccgcattctaccttaatgagtctttctgctgctggggtgccgagaatggtatgttcgggaggttctacagcgcttcttgtaaactaactttttccataataggctgccccgagtggaagaattggacttcgtggtggctgttaaattatgttttctatttctttggcgcggtaagacgtgtgcccggctagtactcgagaaactatgaactcataggctaattcggaagacagttggtactttcatctatcgctggagtcctggtcaaatcatttgcgccgtacgctgcaggctctggtatctcagagatcaaatgcattattgccggcttcgtcatgaagggcttcctaggggcatggactctcctaatcaagtcaattgcccttccactagctattgcgtcgggcttgtctgttggaaaagaggggcctagcgtgcattttgctgtgtgtaccggaaacgtgatatcacgatttttcggcaaatacaaacaaaatgcatcgaaaacgagagaaatcttgactgcctcagcggcagctggcgtggctgtcgcctttggcagtccaattggaggcgtgcttttctccctggaggtgagttcaatcgtgcactagttgataggacgtaagctgacagtcaataggaaatggcaaactattttcccctcaagactctttggcgcagctatttctgtgccttggtggcaaccagtgtgctagcggtacgtttcccatattgccaattgagtctggaccacacctgatccattctaggctgtcaatcctttccggactggtcaattggtcatgttccaagtggaatatgatcgcacatggcactttttcgagttcatcttctttattggtcttggcgtcttcggtggactttacggtgcatttgtaatgaaatggaaccttcgaatggccgcgttccgcaagaaatacctctcacagtggcctataaccgagtcggttgttctcgcgggacttactgcagtactgtgctaccccaacatgtttctgaagatcaacatgaccgcaatgatggagatcttattccgcgaatgcgagggtggccatgactatcatggactatgcgagtatgattattcgcctccatatgcatgaaagaacaccactaactcattgcaggtccaagaacagatggtcgatggtcttctcgctagctattgcgactgtccttcgcactgtgttagttattatttcctacgggtgcaaggtgccagccggtatcttcgtgccttcgatggctgtgggggcttcattcggccgcatgattggaatcatggtacaggcattacatgaatcatttccccaatcggcattcttcgcctcgtgtgatccagatgtcccttgtattacaccgggaacatatgcgttcctgggagccggggcagccctcagtggaatcatgcatttgaccatttctgtaacggtcatcatgttcgagttgactggtgcactaacctacattctaccgaccatggtaagtcttcattctaaattgcattacctcattcaaccatcctgactgtccttttacagattgtggtaggcgtcaccaaagccgttggcgatcgattcggcagtggcggtatcgccgatcgaatgatatggttcaacgggttcccattcctagacaacaaggaggaccacgtcttcaacgtacccgtatctcatgcaatgaccacaggcccgctctcggtaccagcatcggatttccccgtccgcgaagcagagcatctcctaaacgacaacaaattccaaggcttccctgtcgtggaggaccgcacttccaaaaccctagttggatacatcggccgaaccgaactccgatacgcgatcgaccgcgcccgcaaccagggaatggttgcgccaaatgcccggtgcgtgttcaccaaagatgcagccgaggcagccgttgcacgcagggcgtccgtctcgcaccactctcggtcatcagatacattcgatgcaattcagaggagtgtgggggcttctttcgtggatttctcgcgatatgtcgaccacacgccactgaccgttcacccgcgccatcctctcgaaacggtcatggagattttcaagaagatgggcccgcgagtcattctcgtcgagcaccgcggcaaactaatcggcttggtcaccgtcaaggactgcttgaagtatcaattcaaggtcgaagccgaggaacatacactggccgcaacgagttcttctcaatatagtgcgcttggtgggcagctgaacaaccctgcccctgaaacactggaagatcgcttgtggcggctcatccagactgccgctgcgtttgtgtctggtaagatctctcgccggccggtccgaccgcgtgaccgcacgatgcctaggcaaccggagcattcggatattctcgaagggagggatgatgacgcggtggtagaattggaggacagagaagaccggccgatgatatgaaatgcgggatcgctatgttgccacgtttatacgttacattgatagagagttatttgctacatacggaacgttgcttgctcatctatttcccataattgcaagctcttatgtgtttaagccaacggaggcaagaactggaatttcccatattcgcctaatataatctacacttgcctcaactaaattctctgatacgaaggttatcaggacttaggattgttcatctcggggccttggcaaacgagtttcatcccccaaacctgctaaaagatctcgtgaccagccaccgtccagtcctccgaccacaacataccgacctcattacacctatagccaccaagctgtctaaataccatctcccgggagtaacatatctggccggtaatgtagcttcaagttcagcttcagtcgcatccctcgccaattccttcatttacatggattgttacatggatcttggcatttatatgcctaatgcagtatgtggggtaaccctatggtataaatgcatttttattggtgcataattaacgagctagccattttgggacttgtgcataaaaccctatcacccatactccgtaactactccttggtcatatgacacacacctaagagtgatttaatattgctccgcttcgcttcaattattcaatcttgaccgggtctacgatgaatattcccagacaatgaaaccatctcaacaaccccgcactattcagacggagttacagcacgaacgctatgggcaatttcctggacgttggattgagcagcccttttaaaggctaagtaaggttgataggggaagcaagatatcctgggtctggataattcgatgagccccgtgtatgtacatattctttctcaatatcattatttagttcatcgtctttcctcttcccttcctcttgtttttttccgagcgagtcctgtcgatatatacaatacagtcttattctctctcctagttgccttcaaggcttttcatatcatggtcagtttgcatgcactatcgctttcgtagactcatcatccgtatcacttccttgtctccttgtgaaacgtgagagcggaatgctattactttgatagcggcgtgaagtactttcaattcgactacctggatgatagcctcggcgactggctgactgtgagccgccagagctgcttggaaatagccttggaaacagcttattcatgatcggattggttgccgggatgctagcagcgatgatagcgacagctatctcgattcccgaagaaatagagatcccaaaggtgtcccaggaggggtctgagctttggtataatttcacaatgtagactatccgcacaatgctggctatacacgcacttttatctagttagcactaatgcatatcaaattaaatcacgccctggacatacaacgaccctagtgatagcaaagcagcgacggcaaatttcttgctagttttgagatgaagacctgaaattgattagagtaataactagagcgaatcggtgaccacaaacctagaactgttctcagtggcaagagaagaatccaaatatccgtcaccagagaaagcgcggcacccgcataccaaaatgggatagatgcaaagcaggtatgatgttcatatttctgttcatcgaagacggcattgaccggggtacactggaatatcgttgcgaggataatggcgacgctcatggccgtgacgagtgcgatggttccaaggcagattactcggatgttagggaatacgcgtaggtatagcagacagattgatactttgatcagaccgctgattaaggtataaataatgtgagtcacgtatcgaatctatattgttgagactggttagcctcttctttccaattgcgttatgacagttatcattctgcccataccttcgccgaaggtagcacatctgctttaacgagatcccatttatgctttcctgttccatacctgactcctactcacatataagagacgaattaaccatataagaagtagaaggcgtaccaagtcccgcaaccaccacgttcacaattgccagaaccgtcgcagtcaccattatccagtcgtctaggccaaacattttcacgatgaagatcctcgaaattgtacgaaggcctacaatgagtgccgcgaggcccgtcaccgtgccgttgatgatcagcaatataggcccacggttctcaacctaaagagacagttagagaaagctctgggagactgctcttcctctgagcctttacttacatcagatcgcgtctgaaagagcgtctccataatatgttgatgtccttgaaaagaggacgggtcttaggccccatatgaactaatttttatccccgggatccttcgaggtatgcattggccttttgcacccatggatctagggcttattctttcgggcataaatcatacttccgggtggcccccaaacactaatttaatctaatcacagagaccggctgtcgtaatctccgcccgtcttgctttcgcttaaggattgagctagttactactaggaaaggctctaacatatttcacatgcgagcatcaagttgtaatttaccgcatttactatgtgtgcttgcgtggccggcttgcatgcggatgtcgaggcatagatccggcgttttatcccggtggataagcagactgcagggagcgaatgccagtgtgaagcgcttggacaaaggcgctaacctcggtgttatcaccagttatgttctacaggatctgctagtacggagtagtagtaatgaacgatccacctttatcaccttggcactttaaaaagaaattacaccttccgattgcttgggctaggcaataaaagggatgttataatccttgtagaaaattaatctactctgaatagccttttttggtttcactttgtttacaatacacacacttctcgacgttcaatgatcctgatgccttctcttttgcagaacctcctgctaacaattcccctggcatgtctagctagcagccatgccatcagtgattcccttggctcgaactataagatcgatgttcattcccatgtcgttccgtcgatttggaaggaggaattgatctctgcaggctacccagtcaagaatggtactttgtatacagatggcttccctgtcccagattggacattggatgcacacattagcaccatggacagccttggagttaattattcgacaatcagtgtcagcgcccctggcgtcttcttcctaaaagatgccaaaaaggccaaatccttggctcgcagcgtcaacctcctgcttcataagtattctcgaactcatccgactcgacttggagccctctgccttctccctctcccttacgtcggcgaggcggtcgaggagttgaaggtacccttcttttcttcccctagtagattatctggtcaaatctaacttggaattcgtagttttgcctggatacgctcgggtttgttggcgtggggctgtacaccaacgccaatgggacgtatttgggtgacaaagcccttgaccctgttttctcggccttgcacaaacgcaatgccagcgtgtttgttcacccagcttctccagactgcacatccgtcgcccaaggctggcccatcccgatgaccgagtatcctttcgacaccgtgcgtgccattgagaacctgctgctgactggtcaacgtgcacaatatccggatatcaagatgatctttgcccacggtggtggtgcaatcccattcttggccacccgaatcgccggcatggcctccctttcctggttgggtgggctgtcggtcgttgaatccctggcgcaactcgccggatattattttgataccgcttcctcgacttctgctattcagttgacggctttgaagagctttgttggcgtggatcagattgtgactggaactgactgtaagtgggcagtgccagtaacagccccgaaacagctgcagtatactaacacatacagatccgtatgttcctgtctcccaggcaacgtcgggattagccgcgattgagggtaatggtaactttaccgcggtggagatgagtcagatcgatactctgaatgccttgacgatctttccgcggatcatcaaagctttgaagctcagttgagatgtatattaggcattgcttgtagattattaacatagaacagcttttttaatcaccgcattcgcagttaacactattcttatataattcatttcgtttttttgtgtcttccggtgtctatcaagtactcatgcaaagtgcaggagagctgtcttgattatgcatcaggcttagatgcctaaaagaactccttttaccgaagtgcacccagccaagggtgtcgcaagaggtcctcagcggaaattcgatcagtgggattgattttcatcatcgcgtgcaaaaaggagacgaactcatccctgacgccttggtcgagacctggcaggaatgcttccgacgccagccccggccggttcattggcagcgagttcttgatccggccattatcatcaaatatgtcctgaacaatgtccttgtttcctctccctaaaagctccttaggaaatggcccgaatagatccacaatctctcgtaagtgttccttgagctcataatggccgtctggcggggccgatccgctgaacatgcgaactgcccggaagacctcgaatacgacacacccgaggttccaccagtcggtgctcgcgtcccacggggcctgtattagaacttcgggagatcgaagcgctacaggctgtataatctcgctgagatgtcggtcttcccagctggagacgccccagtctccaagggcaatatcaaattcagcaacgcgcgtattgtcagtttcgttgaagtaatagcggcgtaaggggattgaggggatgactgagtactgttcctcggaccgattctgtttgggaatggcgacctcggccagataaccagattctataagggaaaaatccctaaacttgacgaaaatgttatccggttttatatctgatcgtagacaagaaatattagcatgtcatatatcataatgaccaaggacgaaagagcatatcatacctgtatgaataacatgatgttcgtgagcaaaatcaagcgccagtaggagttggatggtgaacctgcgcatcaccgagttcggaagtctactttcaatgaaccaagcgccgaagctccgtagcgtctcgcccatcagctcaaaaaccaagcagacgtgagttccattaggtccgtggtgctcaaagtcatctagcagatggcagacgtggttgtagcccagctgattgcggtccccgttctggagatgagtcaagatcttccgttcgaaaatgggggcttgcgtgccatcataacactcggcgctgagcaccttcagagctcggaactcattttcaatgccaggtctgtttgcgtgtgttatctctatttattccctttttctaaaaagattctactcactgtaccggctgtaggtctctgacaagccagactgtcgaatagacaccatatccaatcttattcaggaccttgtaccggtctttaaagacatcattgatataaacagggtgaaatcctcccggtcggtacacctgcgtgccttcctcgatattgtcgttggtattgtcgggcatctcggagaatagaacgacgtccgtaatgaaggtgagagttgaaaagctgaagctcagcaggagtcacagttgcagcggcagacagtagtgaaaatatgcaaatagacttggctacgcctcttatccctagatgtcttctcaagggggtcgattcagttcgtccaaataagactggcgtggtttctgggcggtaaagtcagcccaacgaacgttcatgaggtcaagactcaagtactactgaaaatgcgcaggtccatattcctttatatatttgtttgacacaatccacttctatattattgcactaaagtcgtgagccaattgtcaacgttgattagtcttccaagtccaaagggggttctgtacggagtagctggtacagtaagtcagccctagagccctatgtatatagttaggtctgagcgtgcatgtattgaatggtacccttgcaatggattactactttgtaattatgaaattgaaattgtaaaatggtctaatctattcactcctacggagtccgtcggttgaaaaggactaaatgcagtccgaattaaaatgcattcctgcgatagataatgcagattgtaagcatagaaaaggcgtagcggtgtcaaactggatcgacaactctaaagctatttcgatagacacaatgccccagatagaccaaaatgacgaaaatcaagcccactcggtgaactagatccccgattaggctatatgcaatcaaagttatgataaatagaacttacaggttaggaatcctaatcaccatccagcagaagactttacgatgatgcattcccaagcacatcgcacagaattacccaggatcagtatcggacgagacagcgtctctcaacaatcgcgctcccggagccaggtgacacgacgtgcctatatatccagcagtcttagcacagatcaaatacgagtaaaaccgcccaaatatgtagctagtcaaaaataattataagcggaagaaaatccacgaatacgaacaagcaacatctttatttgtgtgcagcactgctggccaacttttgcatccccagatcaaacagatggctggtacggagtagataatgatacctatgtacaaggctgggcctcgtgccccgcagcatacgatgaaatagatatatgtatatgtcttgttcactcccacctctataattgaatagtaaatcttttcgcaagttttcctcttcggccgtttgacatccaatccttctaacccgtatatgttatacaactctcctgagtcatgctcacaagcgctaatgatgtcgaatacacgaatcctatcaaacggaccgactcagtggaccaagcagtgattgcatacagcaagacggacactagagatatagcctccgcaagagtgaactgtactccgagacctgagctcgtgacccccctttctctccccctctcagctcacaacttacattcgaaaagaggagaaaacacttggcacactggtggtacagaccccaacgcaccggaacacgttacggtcgtctacgaagattctaatggacagcatgtcaccgttaaacatgttggtagaaatggaaaggctgtttagatcacgagaacttccatgctagttgatatcctgtgattatatgagaaagaagttatcggtacgcgggtacctacaagatttgattacaaacataaagcacttccgaggatatcctctttaccgaagtgttgtcaatgacttcggcgtatggcttctgagcaagtagtcaaggctagcatgataaactagcaaacaactcgtcgagatcgaaaatttccttgcgagtttcttgaatttttactgccgtatgtagtcttgcttggggatgcacttcttctctcggtatatagcctgttaaatcagtcagcatccctagccaagtttactttaatggatattgtcaaccacttacccatataccctagggcttgggccacgcccgactctgaatccgtcttcttcgcttccacaatgataacatttaaagcaacctcctcattttcaccgtaccagactccgtagtctgtccgtgccgagagcattaccaaatttccctagggcagctctgcaagggcagccactctctgtaaaacctttggtaaagccggacccgagtagctgaagcccgtatgctccgttttaacaaagcaaaattggaacggacgatatagtctcttgtctagcgaaatttccgcgagggagtattctggaattttcctaaagttcaaaaacccattcgcttcaagtacactatgcagaatcacactgtcaagctggtacgagcctccacccaactcgcggagaatggaccgccagcccccaagctccagttgtacaaaagaaaatgtcacatggcgaatagaatcttgaatactgtaaagaaagatgcccaaagcagccgaagattcgaatgacattcgcgagaaagtcaattcttgcagttctggcaagcacccagccgacgaaagctgggagagaaggaaagttgattcgcacttccagttgaaaataatcgtcagctttctgagagatttggcacattggatcattttcgccatccaatgtatagtcttggtctcggcatcggggattgcaaagcacagttccttgaggtgggaaaaggccgggataccaaaagtggcaatatcaaattgtgttagcttatcctgaaacactctggttctgcttttcacaatgctgattgagaaatattccatcggaatttgctcattagcgatggctttgagaacaagaccagtggcttcgtcaagcgtgatgccatggctgtacgcgtacggtgttgtataacttaaattgtgcagctcgaaagaccggcagttggacaggcgttttatcacatcgcaccacgcttgaatatagatcctttttgatgtggcatcaggggataatggtcctaggtagccctttgaatccctgacgatctctagcttgcggacacagggacaaaacatctcgtcattggctgcttcctcgacccggacaagtgaatttggtgaaagatcggtcctcaatgtgtgtacaaaagtgtgtgcaaactggcgaaggctgctctgataaatcgctcggcaggtaagtcgaagagcgcatagatcaagagactcggtaaacttgacaatttccgccaccagttcaactgggagagtatggagacctgacttgcgtgctatgttggttctcatactgatccgtggagtaggggacttgataagaaaagaaggaagagagttgagatgagatacagttgaataaaagagaatagtgagttggaagagaaggaaaaggaggataattgaagctccggtcttgtttaagggactggatagtttctcgataacggcatagaatgcggtcatcaaggccgctcccgttttggtatatagggcatcatcacaggtatatatagcttcattaccaaattatgacaaaggcggacaatggaaaaagagggcagaatagaagatgtaatttggggttatatcaagccatatataggaataaagacctgcattatcagacagatgtgcaggcaaacatataaaacaagctagatgaacatagccctttccctcttatgatttgatgccgacatggtaatacaaagtgatgaaaggaaattgaacagtcttttgtccactgtggaaggtccagttggtgagatcaagatctggctgatctagcagttgccaggtttcctttgtggtgcgagttcggaggcaggatataaacccatcaacgaagatagtcagaggcgctacgggcagaataaatgtgaaaaagagatggactggcgaatcccagtaccaaataagagttacaaagaaagtccaaaagaagaccaaaggcgaacatagacaagtccaaagatcgcgtgacgtgatttcgaatatgctgaaggggatcggattagcttatataacaagtggttttaatagattgatgacttgcataaacgaatcggcggtctcaattgcgctcttcagtattcctgctgcatcttcgtctccgaagtgatggaaacaaatgttgaagatccgacactcctttttcgaactttctgcaaatcgaggaacagctcgagcatccaccgcactctcgatataagtgacattctgctgcttcttcgagattcgctcccactcttcaatatgggggtaaagatcgctcaacacaaaatgaacagggcccttaccctcggattcgagctctttattaagctccgattccaggactggggtaggcccaccggcaccggcacatatgtccaaaactgtgtaagaggaaagatctttaagatgctctttgaacactacacatgcctgtttcgcaagatttccatggctccacccgggagctcgaagattccacagttgggtgagaaccagttgctcgtgccgatgaagccacgatgggcaccaatcttggtcgccgatctctagaagatgtgaccgaggccaggagaatagttgcattatgtgtgcttctagatattggtgagaaaagttgtctgaactgagataggccgctgacagggaaatcgctcagtcacgtgccggcccaccgactcttggggacaccttcaagaaataaaacacaatgacaacaaaatatactaagttgatcgcttgtgtctttgaaaagtcgtgtcgtcttggatattacgtgtggttgtatccggggcgaccttgggatgtttcaatccacaaccccttcacaaaatatgtaacttctattcggtcttataacaatgcaaccaacccatcttgtcacccatgaactaaacctaaagtcctatacatccgtggatatatttctgcacactaactgcatggtggtctcggaatttgcactagtcctaattcggacctgacgcagttcagggaacatcactttgacaccaacggagaacatgaaggtcgttattgtcggcggaggtctaggtggcctagcatgtgcaattgcctgtcgccgtgagggaatcgacgtggaaatcctcgagcggtcccccgaagtccacgaagttggagcaggaatccaaatcccaccaaatggcggtagaataatgtgcgactttggcctgcttccccaactactggagcaaggaagtcaggtgcaacaagtggattttcggaggtacaaagatggtcgtcttctgcgatcaatgccatttggggacgatatcacggaggagttcggggcgccgtggatgtacgtggttgattgccttggcgcgacattgtcagactcttaccctttgcagaattattcatcgggtggactatcatcgcattcttcttgatgaggcaatccgactcggtgcggtccttcaactgggggcagaagtagagaatatttacaccgagcagccagccgttcttcttgctggcgggagacgcatatcggcagatattgtgattggtgctgacggtacgtttatagatcttttgtcgaatatatatttaaccatctctactgacaaggaaaggtcaaatgtctacggtccgaagggctattcttgaatctcctcattctccagtccccacgggcgacatggcctatcgagcaaccttttcacgagagcagctggagtctttgggtgatgaaagagtaaacaaactgtgtcagaaaattgccgtcacaagctggttgggaccggagaagcatacgattttctatcctctccgtggtggaaatgagttcaaccttgttctcgtgcggcccgataccttatcattgggttcgcgcagagagcagggagatattgaggagatgcgagagagctacgcaaactgggatgaaacgtaaggacccttggaatagtcgactgcaatttcctaatatgcttctcgctttttagattacaaaagctggtttcgtgtgtgccatcggtatataaatggaaattgacacacctctccgagcttgaatcgtggaccaaggtcggtacaatactatgtccttccaatcacgaacttgctaactaggacttactagggatctgttgccttgcttggtgatgcctgccaccccactctgccatatcaagcacaaggggctgcaatggctgtcgaagacggagcagtcattggcaagcttcttggcctattgcaggtccattatctggatcctagaaattccggaagcgatccctcaatatccacgcgatcttcagctcaagatctcacagctgctgtgcttactctctacgagaaatgccgaaaagcacgcacagcccgaaatgttcaaggagcaatcatgaatcggaagctttttcacatcccagatggctttttgcaaatgatccgggatttcctgttgggatatgcaggagttacccggaagagcgattggacatggctgtcttcatttcggcaggggcaaacccttggtctagatgtgctggaggattgccaaaaggcctttgaggagtggagattgaccctttaattgcacatcatgtggtgatagatggctatacgtcactcctacatctattgctatactatagatccatctacaaaccccatactcgatatcacttccgtacatactaccaaagccaacccaaatcccatcaacgtatccaaaatctctagatcaattacagattatagatccaaacaacctatataacacctaacctcaaacccatcccaaagctaagccccttcccgcatcccaaccaaaatacacccagcacccatcatcccagcccccaaccaccaaagcccaccaaccgcctcttgaaaaacaaccattcccagcagtgccgtcgccaagaaattcgacgccgtattcgtgatggagactttgaccgtcgaggggccagccgttagcgcacgcgtgaagagtgcccacattattatgttgcagaggacgtttaagccgaggcaggcctgggtattgcgttagtaacagaattacagtataacacccagttatacatgtatattgtagtagataaatagtccagagacatgcatagcccagagacaaagagaaggggtgtaaacatacacctcgagtgagcatctcaatcacaggcgatgactcgagaccgaagaggtgagcgagggattgcgcgaaggccgttgtgtggtcgtccgtggtcctgtggaacgttagcatggttcgtggttacacggatcatagcttatatagctttttagcttgtatatatagagtatttctcctatcttgttatagggtagataatccacctacaatttcgcgaaaacaccgttcaatgcagcgaaggcgccgctcgttattgcgagcacgatccagggggatgtggaagactgagggattgactgaggcgttgaggtggacatgactgcggttgatatataactgtatatcctgtaatttatcaggctctttttataggcttgcaggctatgtgcaagtagcgtagaactcaagggctaggtattttggagtgacgttgaaggagcttgcgtgccaagactgatagtgacagataagggaggctgatatggatgatcgacgcgaaacatcacgatagctcaagtagcacttgtttgattaaaacgtcgagtataataccagtagatatgcaactaatctctatccatcactacggcgacagcctctgaactcgccatttagcacccgccccctcaccctcaatacgcacataccggaatcgatcatgcaagcgactccgccgtccttgccagaactccacagactccggcacaagcctcacaccaccccagaaaggcggcaggggaatatcttcaacacccgcaaacctctcctccatttccttaacctttgactccagtagcgcacgcccatcatcaacatccgtctgatcaatatccgccggaacaaccgagtctagcaacttcgccacactcttcctccgctgattctgctccatctgggccggctccgcagaccacaaaaccctactctgccaactcgcccatcccccaatccgactgccgcgctcgcgggtccgccaatacatctcgctctcctgacgactaagcggctcaagcaagccctcaatacggacctgacgctcaacactcgcccagctgaacgtcagcgcggcccatttatttcccgagccgacctcagaggtcacggttggctgtgagcccggttctggcatggcgcccagtgtatcggcgctctcgccgagcccgaagacttgtccgcccttgccttccctactaccccagttgctgtagacaacccagccgcgctcgtcgagttctttcaggtatacgacgcgtgcgctaacgcggcccgagggcagggaggctgttgatagggtgcatgtttctggggcggaggaggctgggagccgcgagtcgcggaaccagttgtggaattggtagaggggatccgtgccgtggatttgtgagatggttaggggtgggtttgtgccgaactggtgtgcgcgtgcggcgttcgagaggacttcggtttcggttgcggttttgtcggtggttgttgcggggattgcttggggttgggcatcttgggtggacttgttggaggttggtgcaatgtcacctggtgcgactttgggagattgatgttaacttgaggttcgtatgggttggggaggggttggtcggatcttttgcagagggatggcttgagatgtagactttggacttacaaattagcttctttggacgcctcccggcgtctgtctggcgttcctcttgggccatagttggcttgtgattgccgggttggttggttgagttggttgaggaatatcggagttggcggggttggcggggaacggtgcggaggaatgagtcaacggctgaacgcagaatcaagggtaaacaagtctgcatggaagacgatgagtgaatggcataagtgtaatacctcgaatttgtgagattgaagaaaagtccaagttggaagctgtgagttccgcagaaatcctgtaagacgttttcagcggaaactcccgaggcgtcatgccattccttggagaatgcggagtacaatagttagttatagaaaatcagacaacatgtttaacagtttaagtaattcactctgcttcattttcattttcgcgtttaaacgcggtgggagagttgagatgtctatgaacaggaataatcacagtggtatacagtgcttcaatgcacgacgccctttttgatcgccaaattaaacgccggaccttcgctggatgccaaaatatatcgtaaatccaaaaacaaataatagatatcccaccaggtatatccaactgccgccctgcagacgccgaaccggaaatatcccaacacagggatccagccctggcagagagattgtaggggtgcaacacaaacattaaatgggtatcacctggtcacatacacagccaagagaaattagagagacgaagaaacaccgatgagatcgatgatcttgccggccaccgcagaagggtatccgcgcgacatcatctcctggacgacggtggcggcattggcgtgatcatcggcgctcaggaatgcacgagtcattgcttcgtaggtgctgggctctcgcttctgaatgccaatgctgtcgtagatggccttggccttggtcacgttaccctcggcggcccagccgtggatcagtgtgttggcaatgtaggcagtcatctcaactttgcgtgcaaacatgttctggacgacttcttcggtgtcggtgacacggtggttggcgaccatggattcaaagagggcttggtagaggcatggctggaggcgcacacggcggtcggagacaacggtgtcgaagactttgcgcgcgccggcgaggtcgtgcaggacgcagcccttggcgtgcactagcgaagcatagtgcacggcatccgggtggtggcctgcggccttcatggattccagcacggcttcggcggcggccatgtttactggctccagggaagcgtgtgcgtcaatgagaagcttgtaggtgtgcagggtgggttgaatgtttcgagcctgcatacgctcgtagtaggccagaactttgctgatgtcgcgcttggtgttaaggaagtactggatcatggagttgtaaggcgcgggacgcggcttgtagttgggcatggactccatctcttcgaacatctcctcggcgaagcgttcgtcgctcacacggcaaagggcattcacaatggttccgtaggtaacacttgtcgggcgcacattgttggcacgcatctcggcaaagtacgcaagacagtcgtcaatgcggcgggccttgcctagcttgccgatgagcgcgttgtacaggaaggaagtgggctccacgccttcagcaacggcacggtgaaagaccctgagggcctcggtagcctcgtcgaaggtcttggtagactccttgagcgtggtgatgtacaagccgaaagtgttggccgagggtgcggaaccgagagcgagaagctcctggtggtactgagcagccagcttgcggtcacctagggtgaggcaagcagcgaccatggcatcaagaatcgagacccagccgtatttgacaacgctgaagttcatatcgaggggaacatcggtccgtgccatactgtgaatgtcgtgagccagagtcatgcggccagccttggccgcagcggtaatcagtttagcataggtgatgtagcgtgggtgacgaccaatgcggcgcatgttgttaagacgagttagggcctcattgaggtgattctcagtgcgcccgctggtcttctcaagctcctccgcgataatggcggatccgcggaaatcggtcgcgtgagcataaggatcaaacgattcgggagccacagatggagtcgtgatcgatgtttccgccatggagacggggctttgacgatccgacgaaaggaacatctgagaaggcgaaacggaggtctgggagcctgcctccagataatcttgccacttcttgacgacatcaggacgactgacaaagagcttgccaacagcctggtcgatgaggccagtggtgtagagatccagagggagagcagaagacagagcgacgtcaagcatgtgcgcaaagcgaacgggatgagcgacatcgaacagcatggaaccgctgctgaccaacatgccagcctgaacttggagtgccagggtgaggtcagcagccttgagctgtgagatgccgatagggccaaggttggcgacagcgtgctcagcgagaggagaaactagaccaccattctctagcatggaccacaagagtgtcatggatgattgaggcgagagaaccgcggtcgattgcataaggacgcgaccaaagagatggagtgactcggtaatctgttctctgacgaggttggcgacagcagcgtgttgatcttgggtggcgttgcggatacgcttaaacatattgcgggcctggtgaagaccttcctcgacgtttccactcttgagcaaagcgaccgcatacatagctgtcggctggaccaggtccggggttgcctgacccaccgtgttcagcatgatccacaaggaacgggcagccgaaacattgccccggcggacctgaagggccagaagtgaaatggctgggttctgtcgtacgtcgggtgcggtgggcaggctatcgtaagcctcagaagcggtggggagatcgcccgcatcagccgcagcaatacagatgcgagaaatggcctgattccgggcttcatcatgcaactggttcttggcctggtccaatgccttgctgtagtctccggtgttgagcgagtgttgcacaagtgcatcttggacaatcacagcttccaccgcagaccaccggtcctggcgaccttcggttacctcgtcgaacgaagaacgaatacgatcaaggaactgcgcggcaccctcctctttgccacatgacaggtaagcacggatcacagcagcatagacctggctgtcctggcgctgtacgatactgaagacgccactgtcatcggagacagcgagccctcggtactcgttataacattcaacggcacttctgagatcaccagtggaagcaaatgcggtgatcatggacgggaagatggtagcatgtggagttattttctgtgattccatatgggcgtaaatccggatcatatcctccaccttaccttccttggcacaggcaatgataaggtgacggtacatctcgagcgggaagacaaggcgattgtgtcgtgccgtggcggtatcaaagagtttgacggcgatggacagggaagtatcctcagcgagaaggtcccgctcaagttcactcgactgaagcatgaacttgccaggctcttccataccaccgaatcgaacgcgttcctgctccaatgcctccttggccttgatcatgtcgtgagcccgggtgaccagaagctgaacaagggtctcataggtatcttcatcgggaattacccttcgacgaagcatgtcagagtagacatcgagggccttggagatagcctgagcggcatcagggtgaagacggatggcagcgagcagcagggcattatatgccccgacagtcggagtaaatccctctcggagcagagtctcaaacgcagcggggatttctgcaaatttgttggagttggccaatcgcacaatacggtccgaagcaatctggttggcttcagagacagcttccgaaacgacggcatcctcaacagcgggttcagcattcgcttctgcccccagcgcagcctcctcggcctgtgcctgctcctcctggatctgaatctcacgggccacggcctcctccacttgggcactaacatcctcgttcacggcagccttggtgggatgaggagctaaatcggacgcagcccggtcttcgtgaatattgtcagcatcctccgccgagggcttccaaccaatacggcgcttgaactcgaactgggtccaatcgctgtcatcaccggtctgctgggcgttctgccatgcggcataataggcagctagaccgagatctccatttccagatcctccttgacttgtcttggcgccagcaccggatgaactggacgcattggagaaggcattctgtaattgggttgtgcgggagaatttggcgggttgggcagcgagcgggttgaagggggttgtcgacgcgtatgactgggacgcggcgactacggattgagcatagccatgagtaaaggctttggtgaaactctggcgcgcgagatgggtgaatggtttgaagaccatttatctgataggcaacctctttattctaaagaggtaatgctggaccacagtcagtagttgtcgatgaatttcacgtgctttttcttaccttgcactcaagataatatcgaaagtgcaggttcatctgacgactgcctgtcgccaatgaacgcgcagatgcaagattaggatgatagtattaaaaggacctgttgttgacagggccagaaatttggtgaaaagagagaaaaagagagaaagagagagagaatggaagcctgaaaaataagaacgagggaggaatacgggcttctggaaggagatggagtttcacagtggaccagctggttagggccgatcttctccggagaatcctcttcatagtccgtactccgttggatctacgtagcttttgtgattgctccgccttgttcctcggatttcctacatgtctatgtatccaagtcttagatgtttgtactggtacattgatgcattgtatctggcatatcagatcttccttataccgcgggggttcccaaacgggtcgtctcgaggatacatcgactgcaagtatccagcactcccatactactccgtaagctggattcgaacagatcaggtggtaaaagtaaaagtacgcgatagacaccaatcaacatcaagatattcgcttgaaaccttggaaaaagggtccctggaagtgagtcacgttttccttccggttctttttcttctttcctttcctcggaacttccgcctcgtcttccccggccattcaccggccattcggcctcccgactggccgactcggctttaacggagaatgacgaagcggcagaataaaagtctgtaggcggtcagcctgtgatctggcttttgctttgatttgtaacctgaaaccaacccgtcgcgaacaggggtttgcctcaccctgcgctttcccacatgacatatcggctttatgattacggtctcttcgacatagtcgacgtcagttgggggtcgattggctccttgtctgggtctgaaaatgcccaaaatcggacttcttcagttgagatctcacacggatcttacccgtggcgaggcacctaccagactctggcccggttcttaatggggtattttccggagataatagcagtcctggtggaccgattttgggtgattttcaggcccaaacgaagagctaatccaccttctgaacttgtcgagtcttcctcgtggtgcttatcctttatgagttggattgagggcacttgaaggtagtccgctaagaatagtaataaagcacactgcggtacgctttgcatgaacatacttactccctaggcaccacggtgcgatatgacagtctatgtcggatgactgggatatcaacatccggtgttgttattgaagagatgccacgaggctttgcttgctttatcgaagagcatgccaacaaataaaaacgtgcctgctgatgagggttgacgacttcccatcgcggtgcgtacacttcaccttctcacactagcctgactaggatataattattacagacatcaataccatccgagcctctgtgagagagacacctcccaaaaatagccgagaaataaaaaggcacccgtggcgatccggctggatcaaacagcacttccagcgaaggctgacgtgcccaaatgctgggcacaccgactaccgaccaaattgtccggaatgatgaaatgtaattttgcaattgctaatatcgctattagatctaaccttaacatcaaataccggtgataccggccggcagatgcatcctgcaaaatcaccaatgcgttgcgagtactgcatacagatttgcagttacttggtcatttcaaccgacagtcacgagtgagagctctatctaatatgaactcgcatcattaagataaaataagctaccagatggcctctgacactgtacagacaataagaggtagatactgcattgttcgatcatgcatcttgggtatcggtcaagaaatgggcaacgccgcggtgaaagtactgctccttagtccagcggcttgatagtttgcattgtatttcttcttatcccttaaaccgcttgaattggtgtccgcctgcattctgtatcacccggccgttcagatcgctaatcaatccaggtgatgacttcttttttcatctcttcgtgcgctcgactgccaacccagctcacctatattgcgcactaatgttgctatcctcgtgcataagatgcacctaatagccgtatacagcggagaactacaagttgtagattaccagatgttcattatatatatgtgaacactgatacctagtgctaactcactgtataatgcggctcttccctaagttatgaatcgtatgttgtacgttgtacactttatttaaactgcctctagaactacgagaaaagccaatgtgatgccagtgggtcatatatgtactgacactccacatgggcgtcgatcgacatccgtgcgaatatcacaggtggagatgagtgcacagactctgcggtgcggtcaggcggtttgccaattttctcattcatccaacctagaaaatgtctggctgtgtatacctacatcgatatagcaactatggaacatcgccacatgtatctagagagcttatgcaatctccttaggccctagagaatgaaagggagtgtccccgttccccggtatttggagtatcctcatcatccgagaagtctgacagtgtcccagttgacttcgatggggcttggggatatgattgataaagtttttgcgataaatcacccattttggatccacccgccttggaccgtgtacgatttgcaatgggcgagattgccacgttcgattggaaggtttgatcggtggttactgaggcctgagttcgatacatgctagccaaggcaaatgtccctgaaggatagggcggctttggaaacttgcccggtagtcggcccaggatttgaatgttgcaagcaggttgtccgcttctattttctatttttccagtttctattgatttctattgatttgagctaagcttttaaatgtcactgccgatctggagaacctagagtaacaagtactgcctttcgcagatggtaaacgcagaagtgagggcggcatcatggatggtcagactggagacctggtacgtatctctccattcattccattcattctcgtccgcggagagactgccacgcttgtttgttgccattgtattgcgcggaatatatcttgtttactaaataggaagcatcgggctccgaggactgctctctttatgctgggtcatagtaaggcattcttgccaagcgcccatgacatcttccctgtgttgggcaccaagtcatgatcatagcaagcgctaacctcatcctcttgattattccactcagtgttgccgctaagtgaaattagagatcgctcgacgttgccaagcaagtaacaagtattggtgcgttatgcctcaggccacaaagcccgcccttgtgtcccaaatagagaaaaccgcctccttcatctcatcttccatctagctatcaaccttgctaatctcttgttcgctctcttttcgctggtcatataagcaatattctcatccatcctcgtcaaactcaagatggaggaagatttgtcctggagcggactaaacgtcgtcacgcgttggctgagattgagaagctgatcaagaaaagcccaaatctgcatattgaaccctctgaactgaaggtggccggtatttgccacattcccttgtcccttgaagggatacccaacaccatccacaattcttcatgccataccaagaagacctgccgttcccgtcgaaggaggagaacgagctgctagaacaaaagcctaacctggatttcatcatgtgggaaactcgcgctactgagtcttttcttactagcaactttggtgattgcttgtcatatgcatcggataagtacccccataatccgccaccctctggccaatatcgagagtaagttgcctctcacagctaccttgtcctgtccgctgaccgttcatgacagacttggagattatagatgttttggtcaactgctggaatgtatcgacttcaactggtacgctgtggaagcattatccacacttcaaggtcatcctgggaagtgaagcgaacggggatggtcgactgcttcgcggagaaatcatgaccatcaccggtatcatggttggtcgtttgagatccaagaggttgcgccctcatgttgttgccccggtaaggccttccataatggatggattctaaacaatctactaaccttgctctggtagatgctggtcctgtctctcatgggtcctcgtcatgccggcatcctggaggcagatttcgacggaaagattctcaacatacgcgcttctaagttgtacgatttcacgcaaaagaacaccgagttcgtgcattcgctgacgcggtattggcttggtggcgcgtgcggcaagattgagctgtgaacctcctagttcggtggtgaagttggtttatgctggacactgcaatatggtcctgtctggcaatggaaatgcagctcttaggatatgataatgaaattgctatctcgtggacgagcgtcacgacgtctacaacttaaatctctaattgagattgcatgtgggcaaaacaaatctagtgaatttgatagccaatgagaggatgcattgtatttcattctagtacggagtactccatagttccattcctactccatccagtatgggggtggtcccgccacgatggtccgcggctctgatttgtcagtcttcgatctcttatgcggaaggcattgagcctcgctatgtatggattggctatgtatggattgctgctgtaccactggctcatgtccgattagcagatcgtactatctaatagcttggaaagcaccatcgtggagcttgcgcggtgcataaagaatccacggctttgagaggttgacaaccgacataacttctagttgcattggatgaaacatgatacaaatctgaccataacattggaaacaagtgcagcgatgctcaacatagccaatgggaaacgtaccaccttgtgtggactttctcggctaaggcgacaattggagtgctgaagttcataactacttgaatatttgtcatgaaacagtaaggaacaaaaaggccaaggactttatctccccaaacagttcgactcatctagagtgggtcccgaaggaatccaccattgaattatggccaaggttcgctaactattccgtacaacatccttcgtatatgcctgtggttcgactgagccaaagccgttgtctacagccttgctaactatcggactgccatatttacttatgtgatgcaggtggtttcaattatgtagatacaaggttagttcacggaaggatctggatcgctttgaggggtctcaaagcagttagcaatacgagccccttgtataattacccctgacattgatagattgttttaggtaatatattcctagtaatacggtaatggagtaaaagatcatgcggtatatggtacataattttatggctcagaagtatgggatcaaagtatctttttatgggtaccttctgagaatcctctgatatcttttaggaagtagaatacaaaaagaatacacaacatacaacacgagattgtattgttaacaggtattaatagagtactcttgataagtactgagtactattgacagtataaccttggaacaagcgctgatatcacgtgccagcactaggtgcgtgcataagtcgtgggtccacccacacgggtcatggtgggaatcaatgggccgtggacacccgtcacctgtggccgaaaaaggcagctccggaaaacgaaattcaggcagatttctccaactgttcttgagaaacctgaaatgcttatttgatcgacacaggtagccctcaactgctcaccttctttttcatagaggttgatctgattcatcttttcccccacttggtcttggtgtctggccatactcccgtacacagtactttgttatccaccaggcactaacgccaacggtgcatgcaggtggcttgaactatgacgtgagagtaatttcaaggtcatatttatgactcacaccatagacttgcccaggtgcatattctaaaaaccctgctttatgctacctgagctcgacataaagataccctagtaatctttcggctgaaccggagatagaagcaatgccaagggctctttataggagcataatactcgatttggagcccacgtgacccggaaatacgggaatcggtagggtctcggagttgagttttcgcccggacgatccatgtgggtcgccaatatatcaagtccctcataatctgttcaatcagctctcatcatctgctttagggttatttacttgaccttttgcttggattggtatgtagaccaaaagaaaaaaaaaagaatagaggaatagaaaaacaaaagcttctcgaaggttgccaatccgtctcaccaagttctggatcacttgaaacgactcgggaggaagttccggaaccgtgggtgtttcgacggttaatagggaagcttaaggtcttcggagattagggtctaggccgctgtaatgatgcactacgtctatatttttctttgtatacttcgtattgtatatctgacatcccacattgggtgatcaacatgtacgatgatgttggctagtcgattattatcatgtatctagatacccatatagaatacagtattcaaactatagaagtgggcctccagggctagatcggcgtttccatgacgatactcatttccttttaaggacccgcgtcatccatgcctgggcatgtcgtagtcgcgtgcaacggccctccttcacctcctccgccacaattggattttggaattcggagcgagaacggaaagccctagagaaggatggcaaaaaaagtgaagcaattgggaatgatggttcttggttatccgaatgaaaatttttgttcttcgggtctctgccgtcttaaacgggatcaaaccattattattgccgggataaccggtaagagcttcctcgtctggtgacgaaatccactatgtggctactggccatacagctgtctcggcgaatgatttttcaatgaataaagggagtgactgtggctcggagccgtagtgcttataaatctcgccagatcccctacagggctgtagccgctggttacttactacacataccccctttcccccaacctcacctaatatatacctcttttttatataataatagcttgtacaaagctctgctatcatgacgcaaacactcctggacacaccgcgccatcccgggcgcagcgaacgaggctcggagagtgatagctcgctcgacgaggtcgcgcaggagaagcagaatgcgctggtggccacactcggccatcatggcaaggacctcgacaattcggcatccccgaagcggtggaagagtttctggacggcattccgacacctgtcgcacttgaccccgaaacaagttgacgatttcatggcgtcatacgtcatctataaccttgactggtccgacgagaagcaaatgaccgaggctctgggccccaattaccaagaaaaggtcggtgattgcttgaagtcctattacggagtcctgaaccacctttgcgcactgggcgatgtcgagaaaatgtacatcccaccgtggatgagccccaagtctagcgtgctcgagaatcagatcctgtacgagcgctcaatcgcgcacgacatcggcttgaggacaggaatgaaggtgttggatctgggctgcggccgcgggcgcgtcgccgcccacatggcgcaacacaccggcgcccaggtaacgggcctcaacattgacccgaaccaggtcgagcaggccgcggccttcaatcaggagcgcggactccagaataatttcgtcacccaagatttcaacgacctccccctgcctttcgccgacgagagcttcgatgccttctaccagatccaagcactgagtctgtgcaaggacctgcccgccctgttccgcgaggtgttccgtgtcgtcaagccgggctcgaagatctccctgttggactggatcagcctgccggcttacgatcctagtaacccggaacacgcggagctcatgcgccgcgtcaagccgctcatcggcgcggtcggtacacccacgcaggagactctcgaggcggcgttgaaggaggctgggtttgaggtcgtgcggtccgagaacgctagtatcgatggtctccaggccccgcttatcgataccgtcgatgtatacttccgcaccctccgccaggcgatccttgcgctcgtcaaggtgcatgtgctgccgcgccacttcaagaccttgattaaccgtctctgtttggatggacaggctttcgtcaagatggatcgcatgcgtctggccacaacgagttatagtatcattgcccagaagcccaaggcataggccccggacaagttctctcggccatactcgagatgtgaggaagttggatgggaatgaataattttccttctcatcaaactctgcggcgatcaagtcgggccaattatccagagcacatccccctcccaccgccaccgccaacgtcatcgtcgctcctcacatctcgattggacatctcgacacaaaataccctgtacatttataatcaacggattagaaggctgggggatttgacgcatggaggagtttcggttatttatctcatttatttatttttgatttttcagaggggtttcttgagcaataaggagtttatgaagggaattgcatctacatcgggatagcagtacatgtatgtacatcaaatatatcttgttccgagtaaatatctgcgacgataagtagttacacattaaggaaggccgaacaaaattataataaaaagtttcaagtcgggattcaatctatgaaaccaaaaaaaaaaaaacaagcaaaaagaaaaggtcgtgcccgggatcgaaccgggattgctggtatcagaaaccagagtgatagccattacactacacaacctgattgatgtgaacagccacttcttttagtatcaagagactattttcatgttttctatggacacttttgtcaggtcctgcaacatccccactagtccctattaggataattccatacacccttgtaactctagaatctggaaaatgttcacgtctcgtataagctgcatctgcatggcagcgtaagcccagcacaccttatccgcgctattacaacctactcctcccccccccaaccaccccgtgaccgcggggcagtccttccataatctccaagcgccccgtagatcccggcatttttctcccccacaacaacaacaatcatatctccaacctaccagtactcgatgtctcctctaccgccttccgtcacggcactgtctgcgccgggcaaggttctcctaaccgggggctatctcgtgctggaccgcggctacacgggcaccgtgtttgcgctcgatgcccgcatccatgttattgtccagcagctgaggaggggtcaccgccgcggggtatcgggatccgagcctgctccgggcgtcgaggcgctatccaattcgggcgttgaggaccaggacggggaggataccattgttgtccgttccccacagtttgtcgatgcggtgtgggaatatggtgtgcagcgatgtgggaatggtgggggtgtcaaggttctccaaaagggagatgggtatgcttggctgtcgctgtttgcgcgaaaacatcaattgactaattccaccttgcttctctctaggccgcgaaacccctttgtcgagacctctctcagctatgcattgacttatatcagctacgttgctgactctaaggacttcgggtccctgtctgtcaccatcatggctgacagcgactactactcggaaaccgctacctccaggggcccggcgtcgcagggacgtagtgggcggtttgtcaatttcggcgttcctctttttgaagcccacaagacaggactgggctcttcggctgctctcgttactgcgcttgtctctgccttggtcattcaccgtaccatgcagccggaggatctcggtactggccgggataaacttcataacctcgctcaagcggcccattgcgcagcccagggtaaggtcggatctggattcgacgttgctagtgctgtctacggttcgtgcctctaccgacgcttctcgccgtcaatcttggaatctctcggcgatgtaggctcggctgggttcgaggagcgtctgttccccatcgtggaggactctgatcccgagcatccatgggacaccgagtgtgttgactttggcatgcagctcccccgtgggatgcagctggttctgtgcgacgtggactgtggctctcagacgccttcgatggttaagaaggttctcgaatggcggaataacaaccgcaaggaagcggacgttctctgggctagcctccagaataacaatgagcgactgcgtcaagagctcaagcaccaggcccaacaccccgatgccaatcccgaaggcgacttttctgatattcgcacccttattcagcgaacacgccagcatattcgcacattgacccgccggacgggcgtcccaattgaacccagtgtgcagaccgagctgttagacagtgtttcagagatcgaaggtgtcattggcggtgtcgtgccgggggctggaggatacgatgccatcgcgctcctgatccaggatgatcccactgtgattgtgcgtctgagagatcatcttgcgaactggacgagcacgatcgaggatgactttggaggcaagatcggtaacgtacgactgctaggcgtccagcatggatccgaaggtgcgaaaaacgaaatgctggagcagtatgctggttgggtctagcttgctctgctctattaaaacaaggcaactggtgtcccagcccaccatgacttatcaacgtgtttcggctaccagcttagccttttctcccctattgcatcctgggccggaccctccagaaaatacacaggcctgtaggataattaattgcacgaaacacagctgaaacatcgactttgactcgggtgttcctatattccacctcccctaccactccatcagtgcccacctatctgcgtctctatcttcagaatcatccccctgcatatgcactacgaatcccatgcgtggccgaggattgcccgttctttttttttttcccccgacgttcccctatgtgcgaccaggtctgtttgccaggtatttcaatatagcctggactcctctcaaggaaacgacctctacaggctaatattcttcggctctatgatacctagtatgtgagatagaatatacatagaatccacttgcacttgcattttatggtgacagtgaaacaatgaaacaatgaaacagtgataactgcatgtatactccgtattatagtcatgagatccctaatcgtcgtacagagagtacaaagctacacatgtggagaaagcgacctgtcttgtccatgcaactatccagagatgtccagatctacatcgtatcaacgatatagcatacaagactcttggcctaactaatttccccggatcttcaattgctattcgctatttactcttataataataccatagaactaaagtactaaaatactagattatgggcatgttttatttttctttgactcaaaaataggggaaacattttgcgtgcagttagggtcaagaagcctattaggcctgcagatccccttttgccttctttccttctcttcaaccaattcaaataatacaatcgaatatcatttgggggggtacatatacgtacagccactccatccacactagttgaggtattatcgcgcctcccgcttagtcttgagtcttgactcctcacatctgcactgcatctctctccctctgtctcctctcattccagctctcacagactaccacttttcacccaaacattctcccgttgacagtgccccctttcctaacggggtaaagtcaatcctcatccgccatcggggcatcctaaaatgtccacaaccgatcacccggagtcgggggccaacaccaacagagatatcaaccaacccccaaccacaacaccgcaggaccaacaacagacctcaccgaccacagagctccaagcccagacagaccttgccgctgatacatccatcccatccgcccatgaccaaacacccatgaaccagatccagatccaccccgcgactggccctggtggcgaaagcgaattcgcccccgagacaacatcaccgaccaccaacccttctcaaactttcgataacgaacctgctgtcgcgctggcaaaactgactacatcaccttcaatggataccgacgagcgaaagaacgcgcccgagacttcgaccgagcactccgatgatggctccgggaaggaagtcgaggaggatgatgctggcccggcgctggtgatcacgctgctgttgacaacggggtcgcgacatccgtttactatcgatggaaactatctcaggaagcgatcggtgaatgttgagaactttgatccgttcttgatgagcgtctacacgctaaaggagttgatctggcgcgaatggagacctggtaagagttcgacccagacccagacccagacccagacccagacatctacatggacattggatgggcaggatccatcctgatgtgggatgtcatggaacgagagtagctaagctaacattgttgttgatgcagattgggagacccgtccctcgtcaccgagctctatccgtcttatttcgttcgggaagttgttagatgataaatcgcctatttctggtatgttttttttccctccttgtggttgcatggttgctatggctatagactttgatactaacaaagcgactagactccaagttcagcaaggaacatccaaacgtcatccatatgaccgtcaagccgcaagaagtcgtcgacgatgaagatgcaaagggaaccaagacacaatacagccgggagcgcgaagcaagtgagcgcagccctggatgccgatgcgtgatccaataatctcgctgcccgatctacgagtatcaggtgtcgacggcatgcttccagcagtgttgtctgctgcttactacttccaccctgacacccaaccttcccttccttgtccgtcttccgacaatcctccaccctcaatctacctgtcattgcagtgatacgcctaattctgcctggacgcaggatcaacatccctgttttgccgagccaacatgggcactctggaaacggcgtttcgacatttatttcttctgaccggatcctaggaccatgatttcgaccggtttttctcatatctcttatttctgtgccatgttcgagccgtttccctgttctctcatcgccatatcatctgcatgcgggcctcatttatctctccatggatcttctctggagtgcttcgatgtcttctcttcgacatgtcttccgagggctcgttctgagattcattctttgcttttcgcattgctgtcaccattattcttaccccgatttctcgatatataccccctccgatccgacttccctttctctttgtgctctatcattttctctgtatggttccttttcttatggcctttcgtgtacttacgactttgtccccctcctttgtcctccttatccttccttttctcgcttttcattccttttgcttgctttttctaactgccttaaggtggttagtcgtagtgtatagggtgtttttggaggaggctgacatgtttctttgtcttatatttaataacttctaaagtgcctatatatctccgcgggcttagtgggaattgctagtcaattcgaggcagacgatcaatccggagtagtacgttgttcatgcatagtttagaaatctctataatataacggctggaagtggtcctgcaagactgcgtggtagagatagaccatggattaattcaatatatcgagagtaatacattgccttgataacagacagcagacacatcggaaatgtatcaagccaagtgatctctcattctatttgacgacataaggtaggaaggagtatgacgagggacgcaagaggagaatagtagaacacatcgacatagaagagaagccaaaagaacaccatatcatcaaagccattagaaatccatcttgagtctcttctccatctcatcatggaaagcaggcggctcacggaggtcatcacctaaaccaaccaggtcagccaaaacacatccaaaccaaaaccaaaacaccagataagaacccaacataccgtggtaaatgtcctcccactgaacctcactatcccgacctccaataacaagaatatcctcatgaacatttccaccccgcacaccgccaagcacagcaggccggaaagtcccatcgcgaacgatcttcagctccatcccgcgacgaacaggctccgcaatcccgtacgcccgacgcagtccctccatcttcaaggcgtcctgtgtcgcccgccacgagataagtcgtgcctcgagcgggtgcgtagatgtgggaacatcgccgctggagttcgtggacgacgcgtgcgcggtggcggcctgcgtgagcttgttgcggagcgtatcagggagtcccggggcggagggcgcgcctttagatgggcggggtgcttggaggcctgcttgttgccgggttgtgaggttgctcgtttgtgttgcgttgccgcttgggggggcgatgcggagggactggggtttgtgttagttttgtgtgtttagaattgggatggggtttgattgagaggttcgagatggagtttggtgatggtggtgttgggaaggtgttctagatgcttgcttatgggctggactccagggtgaggttccgggtccgtagcttgataacgtaccatgatggattgataatgctaggtttttgggttcaagactcgaaatcacagattggataagtgtaggtctgtatttaaagctcaaaaaggagatagaaaagtagaaacaagagcaaagggagggtggaagatgacaagcaacgatgatgcttaggcagagagaagcagcgcggccagctcctacgacagacgagagaaaccaactacgcaacaccccaattcaaatcacgtgccctccacttccgccggcaacaattctatcgcgacattctcgacctagcgaaaggggagacaatttgcacgcattacaccacccaaaatgtcccaattactctccccaatagcccgtcgggccctacggactctgacccaccgtcctgcggtttcctcgcccctctgccgcaccctcaccacatcacccgctatctccttcgcctcgaaacaatctcccattacctcccgcctcaacttccaccccgtcttccgtacagccgtcgtcggtttctccgccgtgccaaagcggcaattctccagctcgcctatcatccgcgctacatacaaccaggtccggcgcggtatccgcactggacagcaggctcgtcgcggtaaatcgcctgcactgaagggtacgcctgggttgaagggtgtttgtcttaagactggtgttaccaagccgaagaagcctaactctggcgagaggaaggttgcaagagtgcggttgagttctgggaaggttattactgcttatattcctggtgaaggtaagatttatttgcactcgaattggtgttggaataggattctgtagactctgttccagtgctggtttttcctacggggctttttggctaatttttttgtacaggccacaatatccagcagcatagtgttgtccaggtccgtggcggacgtgctcaggattgtcctggtgtgaagtatacccttgttcgtggtgcgatggatttggtaagtcactttttgcttctgtttctatatacctacttcccgggtgtatgtctttctagattttttactgattatactttactagggtggtgttggaagccgtatgacgagtcgctcgaagtacggtgcgaagaagccgaagaccgactaagatggatttggggatgcaggttgatcgtgatcgacctgttgtgagattatacaatattggccttgtttcatcagctgctgtataagagactgggctactggattttgggtttttatgctcttcggagagcaaactctttctgttcatatttgcatgtaacaatacggattgcgactgtttatttgcatattatctgtttcgacgttcaagctcttcaagtcaattttattgaaatagaagtataggaaatggttccggcaatatcactttactccggacccatgcaacgaaacaaaccccaaaaaaggatgaacgctcgaaaccccatagtaacacatgtcagacatcgaagtaaacctcctgggcgtaacgcgataatgggaatcaaaatgaaacagttaaaaacgtaaacctgcagccttttgcccaagcgcggtaagatcgaacagcatattgcttcatctaggtgtgatatccaacccgagtagagtagcgggtggacagagatttcaccgagtttttgtagttgcggcgcaaatgggtgacactatcagccccccaaatgcgcagcgcttcatctcaagatgatgacaaccgacccgcgcattgtcgctaaaaaggaacgactgggctatccgtgagtagacccagacggatggtgaacatagtaaaatcagtcgtatttcttgtcccatccgttcggcttctccatcttgttgatatcgaaccaacgcttggtgcctgtatcagaattagttttgcactagaagtatagattggagggtcatggacatacaagagtaatccttccagtcgaagttatctttcggttggcaggaacatctcaagtccaggcgtttcttttcatccgaggggcaatgtgtgaatgggacatggtagtaggcgatgtcatcccagaaatggatttcctccttctttaacatcagagaagcggcgatggagtgaaccggcgcatcgccccaccgctcatagaagaaaccaccgtccttgtccaaagacgtgaaatagtcaatatatgcgtcggatcgcagccactccaagctgccaatctcaaagttcgaccactgccagaaaagttaggtctgttggagattaactcaatttcaatcacttacaaagtggcagttgttgtagctttctccaccgtcattgctgatgaattccatggcatttccctctgagacatactcggggtgactgcctgtgaacttcttcacgctatcccacagggtaggaatggtcgccacatactcgaagagactgatgacaaaactatacttcttgttgttctccttcataaagcggaacggatcggagtcgacatcacagtagagctcaatgctaggctcgacgcgccagtagtactcatagttcatcataagcgggtggcggaagaagaacccagactcataacggcacatatggcggtaactctcggaaccgccgtaaatgatcttcttgcggtccatctcctgtcgcgcttcttgggccttgtcctgatcgatccactctgggtatgaccagtgttccttggggatgacaccataatgagttttgccagagaccaacgcggtggtcaatttcttgaactcttcatcgaactcgtggtcgttcaggaacacccaatcatagttgtagttgtggttgaaacggtcctcgactgttcgaatggacttgaccatgtcccaaaggtcggagttgcgcgcgagggtgacaaaagtggcatttacccgttcgccccggtgtgaaccgataacttgcggtttttgcgacttgactgagtcgtatgtgggggtcttgggtgtaggggtggttattccggtcgtaggaatcgagatggaggattgtgagatgaagaagaagaccaccaatgcctacccaacattagcaacggatattcataaatatgaaagaaagacttaccacgacggcaaagattaaataccgcgcatatcgaatagtgacggacatgatgatgtggggggggggagaacaaggatgattccccgttaagtggcaaggcaacaatagatatcagaccggtgcagttggaaccaatccaatttagaaagcgagcgacatcaatggagaatgggagagaagcaaaaatgaaaagccgccactggaaatcccgaagatgtttagggggggccagaggagattaaaggtggaaaagatgaaaggccgcgcaagacaatgacaaccgctttcagccactttgggtgtcacccaatttgagacattctagtgctcaggggatattattagggtacgggggtgggtttgtaagatccatctccattcgatcttaggggcgatgtcacatccacttataaaagagacataaaagggaaaggattctcgttgctatatgattttaggatgatatctctgtctttggttgttaaccagtgttattgttactatccgagtatatacactaagtacgtagagggccaagtgtatccccgtatactccaaagcctcatatagctctataacatctcatctccgccgaatccttgatctttctttatatatcaatgttcaaagctgcacatcaaatagacgatcgacgagttgtggcttggcaaaaagagcagcctttctgcctgaggcatccgcactccagaacttcccgttcatcgatcgcacctttcctcactaccccccactaagctattcacctccccacctctttcctatccttcctcattcagaggatggctttcttcggatttgatacaaccctacccagggaccgtgatggttccggggccaaggggttcttcgaaaacccagatccctttgccgatattgctcgagctaatgcgctaggagatgacgacgtgtgagcttatctttttttaatggggaacgggccattatacttatcatcatttaggatcgatttcgaggatacctacgatggcctcggggatcagcttcccgacgaccaggacgagttcaacgatgacacgtttggcgaagctggccccaatacatccattggcagagactttgatttcttcggaaggactgctcaggtttccgacgccattggcgaggaacaggttcgattcagcctacaaaaccccaatgtaggccgagtcgctccccagcccgcccaaattcctgttcagccggccgccacccagactaccaagcgctcaggctatgagaagtattcggatcccggctatattccagatttgcaagccaaatctagtgtatggggtgtctcgcagaagaaagctgaacccgctgccgctgctgctgccccgagccggaagatgatgagcttggaggaggtcgaggcacagatgcgttatcatggccataataccgcgacccccgccgcagaggcctttctgcgatccatggtggagcagcctcagtacccacctcagctccagcacctccagacgcttcctgatgggttccctccggtgcctccagagttccttcaggcacaaatgaaacagggccacctacccccacaaatgccacacccaccgcctggtatgccggagctctatggtggccctggaaacatgccacctggtgggccgttgcatatgatgccgaacgtcaatctacctccgcaaaacatgccgcctcttggcccgcgccacggtgtcccaccgcaggcccagacccagcgccctcagcaaccccagcaacctcttcaacatcagcaaggcccggtgccaagccgcggttccaacaatggcatgccagtaatcactaacccgcaacaactcatgcatctcacagaagagcagcgtaacacttatttggtggaggatgctaagcgggcaaagcgcaaccacaagatcttcctactgtcccgaggcaacggtctgatgaccccgcaggacaagaatttcatcacccgtatccagttgcaacagctggtcgcggctgctggaaatgtagcagattcagatcccgaggccgtgctggcggaggacttctactaccaggtctacagccagattcgtggcgcaccgcgccaacacccacaccagcctcttggtcacttcgcccagacttatctgctccagacaggtaaccggctaggcgggcatcgtcggggcaatttccagagtgccgacaaccacatgcagcgaatgcagcagcaggtccagcgtgccgtagaggcggcaaaggccaagcccaagaacaagcagctcatcatcgagggcagcttgggcaagatctcatttagcaatgccaaggcgcctaagcctatgctcaacattaagcgccctgctagctcagagggacctaagcccaagaagcagtcggatctgagtctcagcgatcgcaagtcgatccttacgaaccttgaaggtgtttacagtgcattgatggcaatggaagacatggagcgcacgatgccgccaccccccgaggaaggcgatgccgaggcaatccaggaacacatggaatggagacagaagcttcactcgcttaatcagaagttgtggcggtcattgaaggtgatggaacccattgtgcctaactcgacgacaccacacccctttatcgcattcttgtcataccccaagggcaagaaggccattcctcgcatcttccgtcacattgaccaggaacaacgtgtcactatcctcaccatgattgtcgtccacctggatagcctggatgtggtacgtcttgctcaacccgtgccgggcgaggcccagccaccactcggtgtgcgtgaggccattgacctgttctcgctggctgtcatgccctgtcttttgggatacgtgaacgaggcgccattcaacatcattattggtcttttgggattggtcattaaccaaacccacgtgcagactgtggctcgcaccaaggttggcttggggatcttgaccatgttgctcagtcgtgccgagatcgtcaaggaggccggtcaggcttccgagcatgattggcagcagtgggtcgagaagttcaacgtgctgtttgacactttagaactcggattaaatgacattttccctggatcgatcagctcgggtgacgatatgtatgtgtggcagttccttgccgccgtgggcattggcgccagtcctgagcagcagcagcgtctggttattgccgttaagtgagtgtttccgtttcgatcctagtgcagaggaacaatgctaatccatttgttacagggaccgtgtcatggaaacagtgggatacagcaagacccttcctgccgatatgggcagtcaacgtctgaacaacgtcaacctcttcatgcgggctattggtctggacgttgagctcctgggttaaaaaggctattctatttctgagcctccatgggtatatacccttggcatgttagacaccacttctgtgccagctcgtccagacttggatgaatgagcatgagccccgaggccccgaggcattgattactcgatggtctcacggggcaatgttgctgaaatgcaacacactatctaccacatctccagggaatccggggccctggcaaaaatcaggttgcattaatgtgcctgaacccggtttattttacttttttccccaataccaatttcacttcaatgttctatatttaatgaacacagtaaataagattttgccgagagttccccgggaacggactgccccttgcatatgtccctattcggcagggttgagccgacgttgtttgcaggcaatccgggagtttcagggaaatttcggggattttccagggatcttctctttgcatcttcccacatctctgcccggctttgcatatccttgcatatccttgcccgtttcgagactcagggctgttttcaccgccacgctcgccatcattacacatacttgatgtacataatgttcgcgtcaacaatgataacctcacttggaagcgaaagggaaattagaggtgcaaacatgtagatcagtgggcgaaaatgtaaataaatgtaaaacaagatgaatatcaaaccaccaggccgcatcatcgcagatccacgtggtgagggccatcccgcccttcaatttccccttaaaaagctgcccctcgtccgcattctactccgtactctccccgtactcttccccatctccctaccatcaattattacacggaatttaatcatgtctgctggttctgttcttgttgctgggtaagtggttgaattacctatttgggatcttatagtgagctaattccccgcaagtggcacgggctacattggctcgttcaccaccctggccctccttgaggctggctacaaggtcgtcgttgccgacaacctgtacaactcttcagtcgaggccctccaccgtattgagctgatctgcggcaagaaggccgagttcatcaagctcgatgtcaccgtggagaacagcttcgaccaagtgttcgaagctcaccccgacattgacagcgttatccacttcgctgccctgaaggtgtgtacccgatgaattaagaaagcataaatcgtatacccttcgatccagtagctgatccaattgtctttatccaggccgttggcgagtctggcgagaagcccctggactactggctggtcaacgtctacggcaccatcaacctcctgcgctccatggtgaagcacaatgttaccaacattgtcttctccagctccgccaccgtctacggcgatgccacccgcttccccaacatgatccccatccctgaggactgccctctaggccctaccaacccctacggcaacaccaagttcgccgtcgagaccgccatcaccgacgcgatcaacgcccagcgcaacaatgccatcaaggcaggtaacgaggctgaggccaagaagtggaacggtgctctgctccgctacttcaaccctgccggtgctcaccccagcggtattatgggcgaggacccccagggtgtcccctacaacctgctccccctgcttgcccaggtcgctaccggcaagcgcgagaagttgatggtctttggtgatggtatgcaagccccttcttcccattattgacactccctgatctaacaccatcatagactacgcctcgcacgacggtaccgccatccgcgattacattcacattctagatctcgcagacggccacctcaaggccctgaaatacctgcgtgccaacaaccccggtgtgcgcgcttggaacttgggtaccggcaagggcagcactgtctacgagatgatccgcgccttctctaccgctgtcggaaaggaccagccctacgaggttgctccccgtcgcgctggcgatgtcctcaacctcactgccaaccccacccgcgcccacaccgagctcggctggaaggctgaacgtaccctcgagcaggcttgcgaggatctctggctctggactaagaacaaccccgagggttaccgccaggagccccctgctgagctgctcgctcagcttaagaagtgaatttagttcgggtactgatgtagcacacgtgaattgtggtttgtaatgatcttgtctttgttgatatagaagtcgtggatcttgttgttagtatacatgaaacgaatttcctttttgtgatgattggtctataaatttgagcctattctctgttcacggtagaatgtagcccttaactccgtctatatatcacaccatacctataaaacaggtatacacatatctcactcatttctgagccttgcgactcctcctcgacccatcagccttcttccccttcttctcggccgcctccttcttcgccttctcagcctcagccttctgcttctcgacctcggcctccttcttctcaaaagcccttataacagcactctgcttctccgcctcctcaaccatcttctcactgaacccccagagcttcttcccaacctcatcattgcgcacatccacccgcgcataatccatctcccgacactccttaatgaaccacccacccacaccccgcccatactgctgctccatcgccgcatacagaatgctctgcgcaccctgaacaggcgacttaagtagcagccaccagagaggccaagtgagcaagtacaaccaaagaccccacaacgacccaccagtcaaccagcgccgcatgcccggagtccgcgtcaccccagggtcaacaacgataacccgcgtacacggcggcagactatccggcctcgcgtaagcattcaaatgccgctggaacgagtgcgcgaagatagtcagcgcaagcttgctgagcgcgtacacgcccttgggctgcgcgtacagcgccggagacgtcttcgtgcgcttcgataccaccttctgcttcccgcgcgccatggagtccagatttttcaagtcaccgccgatatagccggagcatgttgcgaagatgacgcgcacgtcgcggtgtgcgggctgcgcgcggagggctgggctgaggatgctaaggaggtggaagtttgcgaggtagtttgtttgccattctaggtcaatgccgtctattgttagggctcggggtttggagggctcggctgttccgccggcgaggattatgcagtctagtcgacggggtgggatgttgtcgatccattttgttgcgaagaggcggattgagtgcagggaggagaggtcgacttgttcggcgtagatgagagggttttttgtgctggtgcggaggtcgtcgatatattcggagagatagaggtcggagggtggttggcgggttaggaggattacttgggcgccgcgagttgcgagcccgcggactacttctgcgcctatcccggaggtgcccccctggatttggtttttgtcagcttggttgattgggtagtgatgtggtgctggaggggtgttcttaccgttaccattatcacttttgatcgcatcattcgctcggagctgttgcgggctccttcaaaatagtatttcagcgccgcgagggctagcacccatggtgctatgcggaggattgtccaagcatacgggatggatgagacaccatcccgcaggccctgggcaatgatagggatgggcataattaattgagaaatgaagatgggaagagagaggacaggtgtgtgtctcctaagggatttctccaatgtacacgtatctccgcttatcttattccttatcgccaccctctaattccgctccgcccctcaaccctctttcttccttctttctttgccttgacagctctacaagtaccaaccatggcctctgaggacgaagactatttcctcccaccggagcagcagcgccccttcagctccggaatccgccgcaaacgcgtgcagttcgtgcgctcgtccaatctagacaccacaacagccccaactccctctctctccgggactagcatcgcagacacatacctctctattgtgatgggccaatcagccccaagtacatcaacacatacaccaactcagcgcgcagaatcaccaccaattcgtacgcagtccgcaccgccaacttcagacatattcccgcctccatccacagtggcgcccgcggcccaagaatactgtgacgtgtgccagctacctctcccaccacaagccccagcggacacaacagaccaaaaacttcgcccgcacgaagcctccctcgcgcatcaaatctgcctcgctcactctcacccgccatcgcacctcgaccgcacgcgcacaggtctccgatatctctctacatacggttgggatcctgatagtaggcttgggctcggcgcttcgggtcgtgagggtattcgtgaacctatcaaacctcgcgtcaagcatggtacggctgggttgggaactgggcttgatcaggatggagatccgctgccgcctagaccggcgccgccggtgaaggtgcagaagcttaattccaaacaggcgcggaataaagccgcggaagataagaagagggcggaaaggctgaggaaggctttttatcagagtgatgaggttttacactatcttggggaggggatttaggtcgtggattttatggatggaggagagttggataccctcattttgtttgttttttgtgcttgatgatacccctattgttatttgttattctttaaatgggtagcgattagaacccaaaaacgctgtcaaactatattcaattacaaaagtaagctttgtcaatcaaagcgttactttatataaaatcaagaagccctccgagcccgcttaattgagcgatcaactaggttttcaaagcctactagatcactatacaatccgccgcttttctcgagaaagaagtaagcgaattacgcaccgccaataagaagcagaagcactagatcccggaggcagatacccgccgaagaagctctctcagtctcagaagcctctatattaattatacagcaataggaagcaattgaggcacctgcctccagtcccggtacaacttaggaaacgagatacatagagatagaactagagatagcccaaaaatgacatgcgttccttgggaaaccatgccgaattaaccactgccagtaaaatccatttgcccaatctgccattcatccaataaatcaaatcctagaaaatcatcatagagcaacggattattctcatactgctctacctgtgtatgcagcgaagcgtctgcatccaccatggtgttatcttgtacttgaccgacactgttgggtggaatcaagtacagatttttcttggcaagaatctcctcgaataatggcagggctcgtttcagggctggtatttcttttccctgtgtgagaacaagcattgtctggctaatagagatttgggccatcgaacgaacaagatctgtctcggctgtatcgagggccgattcgatgtgtagagcgagcagtgcaattattgtggttatactggtaagtctatcgttagatatccatatttttgcgctctgtagatcgggaaatggggaaaagagaatggacggcacatacaaagatatgggaaagtcctggagggtaccactcgccagaacccttttggtaattgtgtccaactccaaaatagcagaccgaagccgctgtttgacccactcgctccagtccgcatgatgggtctgctgccaacaacgtcgtatcaatcgacacaagatgcattcaaatctgtagcccatggcttgcatagccagatagtacacatcggttccaatgttctcattcatatgcatcttgacagggagtgatttgcgccatgaatcaagcgagtgaaacatctggcggggatcttgctgtggcttggttgtcacgttggacaaacactgtccgactaaataagagtcagccatgcttgtggtttcagttatgggttgatgataagaaggatagagcgtaacaacaaagaatcgaataaaaccagcacctacatattcgagacaactcgcattgaacaacaggcaaggccctttgttgaggcgtgactggtgatagcaagtcagatgatacttccgagctaatctccacttcccagtcatcttccgtcctcagtctgatcgtggaggtagtcgcgagtagtcgcgagcgtctagtattgacagagacatgaaaaatgtctaaagtctacgtagctacagtaaacataatgcaggaagaacagaacatagtgacgagaagaaggacgtacgtagagagcccaccagatccttctatacaacttgaagactgtaccagctttgtcttctcgagcacacctgtggaaaaatccgtaggcagttaatacccgcaatactcattccaggtgctatagtccaggagtaggaaacgtacacgttgcgtatgtcaagcttagtggcaagacggattgcgttgtggaaccagtagccaaagtctcggtcggtagggtggtcgagaatcaccatgcacaagatgatggatccctgcagcatcaacaatgggtcatcttcagcggaaaagtcgtgaagcagcttggccttggaaaaaaacaactcttgcgcggccgagcggctagcaaagccgcaggcggatagcacgtctgctggcgcatggacactggccggtgccaatatgacgtatagcaagaacaatgagcagtggccagattgatagccgcggataaaatcaactctattgatcaccggagcaaaggggtagacgtggtcaaagtatgtcttaacgagggaatctctgttatgatttgtcagtgagtagaggcaaatgcgaaaccccgaataagatggaggattataagcttggtctcacaggtagcgtgaaggaggtagatcaaatacccccttcttggcaagaaattcgttgtcaatgtcgtccaattgaggttgcttggcccatcgacaattccgagtactaaaactatattccgggcttgggcggtagggagtgctgaaaatggggtggtgtcgactagattgtgtagtcttttccccggcgtcgtttaagatattgagatagaacagatctagctcagcctgacgtgggctttggccatccagatcggaagtcgaaggctgggccgactgttcgagtgattagattgattagatcgattagatcgattgagattttgaattggaacactgtcaatcatctaaaacatactcgtacatgatcagggatcggtgaaacatggtttaatttccttggagcccatccaagttagcacgcgcctaaaagctactaggataaaccatgagccatcctatcattaatcaactcacctagcacgacccttacggaccggtagtacacagtccttgacacactgcctgctggtacaacagctgcaggggaggccaatctcggcggcatcgcatttggtcttgcgtgcacggcagggcacacatgccttattggctttgagggcacgctttccggcttgtccggacaccgcggttggcttggccccagaaggattcatccgggagaagtgtgtttgttgcagcctcggaattgcacggacggggtaagctttgttttaagtctttcgaggctcggtgattcaagttccggtccgatcggggactcacataatccttgaattcagccatggaggccccccatttatattcccggttcccggccgcttcgtacatgtaaggagtttctatgctacattatagatttattgaaataatcctgctgtacaattaagtttatgttgccatccaagctgatttgggggcgtagcagatcccccgctatttaatgtgatctaaacagtctcttcaaccttactctctagcccatttggctcacctacaatcatggcgccttgccgacggctcatcgtctccagcaccttagctgcttcgagggaatacttgcacttgctgcgtatctgcgggccgtacttgtagaaaagaaacgggaaaggcacgcacgcaagaactaggaatgcaggaatggagctcgcccattgatttccgagcttctcgtacatttgggtggtaaacaacggaaacgcagtgccgaacaaggaccgaaccactgagttggctgccataacagaagcagcatagacggtatctttacgcaggtgagcaagtgcattgttgcataaggtcacggagtaacgatcaaaacttacaagagtcgatcaggtagctcatcagcgagatgaagaccatgacgagtccgcacgagaagaacacggcaccgataatgggtacaatccagtgcaccgatggatacgtcgtccaggcaaacatgaacaatccaatcggaaccacgaaagagcctaccatagccgtactcagtctggcttctggctcgactgtgcctcctcctgcgtcgatctccttgcaaagacgcacatagcgtttgttgtctacgccggccgccagcgtggcaagacagacgccaatggcgacgccgataaacggaagtccggcgatgccctggctccagcctcgagtatattggaagaagataggaaacccggcaaaaaacatgtaaagtgtgccatagatgatggcgacgtacagcgacgtcagcaagacaatgggctcgcggaacaacaagatccaggggcgcgtgagagagatcaatagctcctgcgagaaggtcttgggcggctttcccgcattgatcctagacacatatactcgtcctgtcacccgggaaagggcttcggctcgacgttggagaattaacggtgcgtatgtttcgggggtgatcagcatcgtgataatcgagaccacgcctgccattatagcgattaacccgagaggccagcgccaaccctgtttctcagcaagaaaaccaccggcaaggggccctaaaatgagaaacaatttagtaagtttcaagtgtatcagggcagaaatggcaggaaatggcaacatgtaagaagggcatcttccaccacttaccaagcgcaggtcccagaaaaggagctgtgacaaaaaatcccgttgcgactccgcgctgtgtcttgctaaacatgtcggcaatgacacccccggtattggtcatcgacgacgaaccaaatgcgctagcgaagaagcgaagaaccagcaaggccgcgatattgggagagcaggccgccgccacgctgaacgccgtgtacgccatgaacgaaatcacatagatggacttgcggccatacatctccgaaagaggcgcccatatcagcggtcctacagcgaaccctaacacgaagagcgacaagcccagcgtggccacctcctccgacacgttaaattgctgctcgatgcctccgatgccgctcacatacaccgagctggaaaaggtcaccacaaacgtggatagagactggagaatggagatggcccattttcgcccattggaaaaattcatggcgtcttggtggtcattgtgcaggtaatcgataatgtatgggtcatcttctgtacctttaccagtgtaattctggttgcagacattgtcgttgaggcgtgcgtggaagaaaagatattggatccaggacatgcgtcgagaggatgcctgtgaattcttgacttgctgagggatctcattgttggagacagtggcctcgggaacgacagccatgttgggaacgacaggaagaacagggaagcaagtgttaagattcaagatatagacggagcaaaaccaactagttttcatgcttgaactgtctttactaagtaagtatacaaatcgtgcgcacagttattggttatatagttcatctcggacattcgcaatcggagtttcagcatggcgatattgccgagaacaaaagcccgcggcattatctgcggaaatatattttcttgacacacgacaaagttgggcgatatcgccgaagtgtatgcatcggcccagatcaggatattttctaagctagctagtgatctgtaatccacaggcttccatatgcttgtggacgtggtgtgccttttaatagatttcggccccagctgttgacatgatatatgtgactaccgctggaatcatcgattgttcgaggacgacagttgctctttctctatagaagtctctttagaaggaggaatatcccggaaatttgtattgtctagagcctgagttgatctaggctattaaaagtgatgttatcaagaactaaattgattcgccctagtcgtttctggccttaggtcatttttggcgtcaatcccacaggtcctgatattctagttgtactgttgtggttttacgtggatatcagttttgaatgagatgcaatgtttgtttctgtctaaggcttgacttgaataattaccgtgtactaggtagtgcaacttgaaactgtgtccagattctacctagcataaattggagtgtagtgaaaacattcccatgttaagtcttataggactcatcttaggagagaaataaaaaaccgctgagaatagcgccttgaatgctcgggaccagacctgaccaacagaaagacaaggaacagaatggtatcacaaaagcgctgaatgcagcaggacacaagaaacagggtggaatcaagaggaatggagaatggagaaggctacttgaagaaacggtattttttctccttcttctcctttttctctttctccttcttgtccttatctttcttgtcaggcttcccgctgccagatgaggcagggctgcttctgcttccgtttagagacataccagccatcagcgcctctggcggagctggggggttgaggtgtgccgttgacacaggcttcttctgtggcggcggattgggggctgggggagcctcgcgctcgaagagatgggccggggcagtaggtttggggcgctcggatgggaggtcgagacgacgccggtcaacaccaaggtcgcctacctggcggaggaagagacctggggtcagcatgtgcgtcgtggcaaggtagacgtcccggttgtatgccgctgagacttcataacaagctcgtgactcgccgtaggtagcaccaccggccatgaagacgattatgcgttgtcgaggctggtcgacggatcttgtgcgcgcccaggtgggttttgcgctgcgcaaagaggcctgctgtgactgtatttcctgggcagctatggcgccgtcagtctcggtgtgtggacgtgtgaaggggaaggtagtcgcgtccagattgccctgaatctgatcttcaagcatctgcttgatagctaactcataccggctcaggctgagctcctctgattcgggtggtgggtttcgtcgggtgaaaaggggctgcactggtggcttttcatccttgagaggcttctcgatacgaactccaaggagttcgaggttggcaatcaccccgccgtcttttggcgggagtccagcatgcgccatgagtttgcgaatgtcaccacctaacaatccgccgcgatacatgatgtacaaaagtatgagtcgaagccgatctggttgtacgactgagtcgtcatcgaggagctgcacgagttgccctgctaggttctttgcctttttgtagttctcatccaggcccgtggcgaatgactgctcggtggagctcacttccaagagtttgcgggactggaagtagttcatacactcttgtgccatgttgaggtgcagcgtgtaggcacttttaccctcttggaactctgtcagtccgcccaacatatccttgatggtgttcacattagacttgtcgttactaaaatctcaagttagtggtccgtgtatagggatggcccgttgaaactcactcgtctgcaaactgagggtgcgctgctcggaatttggcaaagtcctcgcccagtttcccaagcacatccttcatatgcatatggcggtaggtcacccagactcgatcatgctcgccaatttccatctccttgacctcctcattttggtttccctggttcaaaaccgttttgtaggtaaccttgtctccatccgtgacaggaagaagatcatggaccatagcctggtatgtaaactcgtgaatgaggggcgcgaacaggtccatggaacggtctactacgagcagtacgcctcgggggcggtttgtttgaggcggaaagtcacgctgatgctgcgcgaactgatccaattcgttctgaatgaaacgcgccaagtgagaacacataactccagcctcgtgagtcggagatcggggccgatagtaccgaattatagggtattcgcctaaagaagcgcaaagagataccacctcgattcaacgtcagcaagcccaattggcatacacggatagcatcttaccttttgagccaattcttccaaatgaccccgaatcaaattgttgcaactcgggtggaagagcactgggaagctccacggatcccggaatgtgatcaaatgcgattctctggggtagaaattgatgttcatagtgtagaagtccgcaatgcgctcgcgcgctatttgggaccggtcaatccgagctcgctgctgcggatcgagggctataggctgtgtgagcggaatgacgtcgcaaaggcctcgggttcaccagcccactaacatgaagtccacaccaagaatgcctttctgtatcggcccacctcgaagtctgccatcagacagtcgaccacgtacgattccggggacaatatgtacaacgcgtccatatcgggattggacggtcgtcgatgttcgagctgctcgacgtctgcggtgtggcattagtgacatcgtttgggtcgcaaagcacaagacgagctcactggagacattgagattgagaatttcctcctccttcacagcaccgtagaccaatttcttgctggtctcatctaccaccaagactttccactattagggggagaatgccgtcaatatccgcggtagaggggttgatcgggggagggggggtgggctcacctcatcgccaccggaattgcggattgtgttcagtataactattccagacagttcaaggtcagccaaggttctttgcaagaggtagtagaagtagtcacccacagtcgcgttgaatgttaattatcgaggagcccatgctggcgggcagccctggggcttcagaatgaggattaggacaaaaaataaagaaaaagagaaaaaagataggcaatagtaaaggagattgacgagatgttcagttaaaggggaagagaggagtgtcaggtggccgtctgaggtatatgaagggaagatggttttccccaccattggagcttgaaagtggatcggctcgataagggaactttttggtttctcctatgcaggttcttgttctttatcctctctacctttctcttttttggcttcggttcaactgttcggccttctttgttcccaaattgttcctctctacgggattggagtccccgtcgtccaggaatgcagccatggactagcggtagtcgttccctctatgctttgcggcccttgactcgttttgctgtacggcccttcaccacaacctcgattctgcagcgctcgaaaaaggtcaaaacatcgccggacaggaaagcggacacaaaaaagggcaaaacacttgtggggaatcccgccgggagatccatccgacaggatattgcggccgcacgagatttcaacgaactcgtggaagcaaccctacgcgatgtatacagcaagttgaacaaatcaggcgaatcgctagaaggatggacccaatttgagcgccaaatcaaaaacgcctgcaaatcagatgataagaaagcctctgcacaatggggaccccttcggcatatcaaggtagcgctgcaaaaagcctacctggcatccggacttcagggtctgcgggaggaggtggaatacatgcagtattcggaaaacatcactgccaggttttcggcacccatcctggaagcacagcaagaagtggccgaccttcggtggccagccgagtggtatccgcgcgcacgatcgatgcagcgaacaatccatctccatgtcgggccgacgaattccggaaagacctaccatgcgctgcaacgactggcgaaaagcaagaacgggttttacgcaggtccgctgagattgctcgcacaagaagtatatcatcgattcaaggcagatggggttccatgcagtttagtcactggtgacgacgtcaaatttcccgaggatgatcaagtaccgcgtattaccagtaatactgtggaaatggtcagcctggggcaggaatacgatgttggcgtgatcgatgaaatccaaatgattgcgaactcatcaagaggatgggcatggactcgagccttccttggtgctcaggccaccgaactgcacctgtgcggcgaaacccgcgctataccattgattcgggagctatgtgcactcacgggagatactttggaggtccaccgctacgaacgcctgaacgccctggaagtgatgccacatagtctaaagggtaatctcaatagccttgaaaaaggcgactgtgtagtcgtattttctcggaaaggtatacacgctatgaaggcagacattgaaaagaccaccggaagacgcgcagccatcgtttatggtggtctgccggcggagattcggacccaacaggccaatctgttcaacgacccagacaatgactatgacttcctcgtagcaagtgacgcgattggcatgggtcttaatctgtaagttctgtgctccctggttatatttacgctaccatactaacccacgataggagctgcaagcgtgttatctttgacactctcgtcaagcgtgtcccgactggacttcaacggcttactgttcctgagatcaaacaaattggcgggcgtgctggtcgatatcgtccagccaatgccacggaaagcacaagtgaggagcctaacgtgggcctgatctcctgtctcgaagaggttgaccttccatatatccaacaggctttgaagttggagcccccaccgctgagtgcggcgggcatcttccctccagaatctgttttccggaaattcgccgcctatttcccaccaggtgtacctttcgaatatctgatcaagcgggtcctggacattgccaaggtcaaccctttgttcttcttgtgtgaccctagcagtcagttggagaacgccgagattatcgacactgtcaaaggactgccgtttgaggaccagttaaagttcatggtttctccaatggaccgtaaaagttcaggctcgcgtgatgttactggtgctatggcggactgcgtagccgaacaccatgaaggacgacttctagatatcgcccatctcaacctggaagttatcgagcagcccgtttctggcagcaacgactatttgcatgatctagaaagccttcatagggcagttatcttgtacctgtggctcagtttccgattcggtggtgtcttcactgaccgaactctggcaagtcatgtcaaggaacttgttgaagagcgcatggttcgggcattgaccgagttctctgccaacaagaggctgcggaagggtgcttctctgaagcgccagattgcgctgcagaaacagttgttggagcaggaacgtatgggagttgctggagactggatgaagccctctggtgagggagagcagattgaaatcaatctgcccgaagaaggtgcttcagaggctgcggaggctgcggaggttgcggagggtgaatcctctgacgccgaactctcattatttgaatcgtcaccggaggcagagggcgaggaagagggcaaggaagagggcaaggaagagagctcatcacccgactttgacgactcggagcctgaactaacagagtcatactatgacacagaagtccccaaagagtgatgaatatgtacaacaagaaatatgtatattagatgtataaaaccgatctccaatactcatacctaatacctatcaattatttctttttgctcaattgtacgtatttttcagcttgcattcacatattgattgaacatgttggaagactcccaataattactattacatctgcataaatggatgatgaagccttgccaagagacagggctacctcgggtgaacctagcgctcagctcaccgattttgtgccaaggatcgccttatcttatcggtggcaacttcggccatactaattttccgccatcaagatctccgaagagctacagggtagcagtgttttgcgcgctcgccaattttcacgttacttatccagttttgctggctctgtcttttatctggttggatctcttttgttccaccgcccatcatggatgacctcgagtctctggagctgttctcgctcgtctcgcgcgtgacgaacgagttcgagaaccatctgggaatcgccgacaagactctcgcagagttcgtgatcgatcagcacctcaaatgcaatggcaagttttctgaattcaagaaatttttcgacgacatgggcggcgaattcccgcagagtctcctggaaagtgtcgaccgcatggtgctcacgatgcaccccaaatacaaaggaaagaaagcggagaacggcaaaggagcttcggatgccaaagacgatatggatttgcttgatgctctggagcaaaaatctcgcgtgttcaagggccttgcggtccccgatacggagaagcgctgggaggaagaagactacacagatcctcaaggcgcagacgaggccgatgcacaggcaggcgcgatggacgacacttttgccatgctcgagggactggcaggaaaagcgaaggaggacaaaccgcatgcgccgagaaacgatcgcggaactaggaagcggagccgcagccccgagaacaacgattacgaccgtggacggcgcagagacaaataccgctcgcgatcaaggtctcgaagcgccccggggtataacaaaaacgatgatcttgtggacgagttcgggagatcgattaggaaatatggccgggaagacagccgtcgcaatggccatagtgaccatcggagacaccgtggtcgcgacgaggataatgatttccgtcgtcctccgcctctcgagctggatgaccatcccgttcttttcaaggtctatgatggaaccgtgacaggtgtaaaagatttcggtgcttttgtgaatctaaagggcgtcagggggaaggtggatggtcttgttcatgtttcagcaatgcaagaaggagcacgagtgaatcatccttcggatttggtctcgcgcggacaaccagtcaaagtcaaagtggctagtatcgaaggcactcgcatcggactgtccatgaaggaggtggatcaagtgacaggcatggatcttgttccccagaagcgccttgcttctggtgcaaatatggaacgcctcgatggtggattcatagatgacaagtacggcagcctcggatccgatgtgcccgttattgaagggtctggaggtcgaccaatgaggaaccgaaagcgcatgacttcgccagagcgatgggagattagacaattgattgcctccggggttgcctctgcagcagattatcccgacatcgacgaggaatataatgcaacgctcaccggcgaaggcactttcgaagaggaggaagatatcgacattgaggtcaaagatgaggagcctcctttcttggctggccagacgaagcaatccctcgaactttctcctattcgtgttgtcaaggcccccgatggctcaatgaatcgttctgccatggcaggcactaaccttgccaaggagagacgcgaactaaagcagcaggaagctcaagacaaggcggctgagaaggcggcagatgttgatctcaatgctcaatggcaggaccccatggttgcaccggaagagcgaaagtttgctgctgatcttcggagtgcccagcaacccaagcaggacgaggctgtaccggagtggaagagagtgacgatgggcaaaaacgcatcgtttggaaagcggacaaccatgtccatgaaacaacaacgcgagagtcttccagtctacaagttccgaaagcaattgctggatgcagtgaaggacaatcaaatgatgattgtcgtcggagatacaggttctggaaaaaccacgcaattgacacagtacctggccgagggcggatatggaaacaccggaatgattggttgcacccagcctcgccgtgttgctgccatgtcagttgctaaacgtgtagctgaggaagttggttgcaagctcggagcagaagttggatataccatccgtttcgaggattgtactagcccagacaccaagatcaaatacatgaccgacggaatgcttcagagagaaattcttttggatccagacctcaagagatattccgttatcatgctcgacgaagcgcacgagcggacaatcgcgactgatatcctgttcggactgttgaaaaagacagtcaaacgaagaccagatctcagattgattatcacctctgccacactggacgctgaaaagttctccgaatacttccacggctgtcccattttctccattcccggtcgaactttccctgtcgaagtcatgtactccaaggagcccgaatctgattatctagatgccgcactcatcactgtcatgcaaattcacttgacagaaccgcaaggtgacattctgctcttcttaacgggccaagaagagattgatacagcatgtgagatcttattcgagcgcatgaaagctttgggacctactgtccctgaactggttgtcttacctgtttactctgcactacccagtgagatgcagagtaggattttcgacccggcacctccaggcggacgtaaagttgttattgcaaccaatattgctgagacctcgatcacaattgatcagatttactacgtcattgatcccggttttgtgaagcagaatgcctacgatccgaagctcggcatggattctcttgtggtgactccaatttctcaagcgcaagctaagcaaagagctggccgtgccggaagaacgggacctggaaagtgcttccgattgtatacagaggctgcctatcagtctgaaatgcttccaacaaccattcccgaaattcagcgtcagaacctctctcacaccattctcatgctcaaggccatgggtatcaacgacctcctccacttcgatttcatggacccaccgcctaccaacacaatgttgacagcactcgaagaattatatgccttgtcagcacttgatgatgagggtcttttgactcgacttggacgaaagatggccgatttcccaatggaacctgcgcttgcgaaggtgctcattgcatccgtggattcaggctgctccgatgaaatgcttagcattgttgccatgctatcaatccagtctgtcttctaccgccccaaagaaaagcagcaacaagcagaccagaaaaagtccaaattccacgatccccacggcgatcatctaaccctcctcaatgtctacaatgggtggaagaacgcaggcttcaacaactcctggtgtttcgagaacttcatccaagcacgacagatcaagcgcgcccaagatgtgcgccagcaactactaggcatcatgaaccgttacaagcaccggatcgtctcttgtggccgagataccatgaaagtgcggcagtctctatgtaccggcttcttccgcaacgcagcacggaaagacccccaggaaggatacaagaccctggtggaaggaacgcccgtgtacatgcaccctagttccgcgatgttcggcaaaccggccgagcatgtcatctaccacaccctggtcctcacaaccaaggaatacatgcactgcaccactgctattgagccgaaatggctcgtggaagcggcgcctactttcttcaaggttgcacctacggatcgattgtcaaaacgtaagaaggcagagcgcatccagcctctgcacaaccgctttgctggcgaagacgattggcgtatctctgcccagcgacgccaaggcagaggtggtggtggtggaacttggggttgatttttgttatgtttccaatataccagctatgcttgcaaccgtgtgttattttctgtcttgcgtcttatatctctctatcattgtatttttgcatgaatcacttagcttaaaatatcggagttggttttttttcgatctgggaataatttactggttgtgcattaaggtggcagtttgaaagaatatcctacttgcaaagagcatttgtcgtaaatatgtcaaaacctcctcctatctggtgcagagtatcgcagtgcaattactcgggactttggtattttctctagtcaactcggagcaatatagaataatttttcctacgaatgagattgaatggtaagtgaccaaatgttttagaatcagtttcaagcccgtttgacactcctagatacacgagttcatatccttcgcaacaacccagtcatcactcaaagtggaattcgtctggtcatgtcagtaggttcccaggagcagtatagttgtcaaatagtcttctagcctacacattcttcctcatttccatgcttgagaacttcgggtgtagtgccagcagtggttgttttggtgttattgctcttatacgcgtcaattgtccagcctctgactttcgtgattgcgttaagctggcgcgtgagggtctttttacggtggacgtccattgccataatcttgcactggatctgttccttaagcgtctccattcgagatgtctttctcatcctctcctggcacaatccaatccatttatgagaagctgcgttggtcatctcgctgtccaggaccgcgatctccttgacaaggtcgttcagctcggccatttgggctttgatgacatcgctggtgttgtatttcaccatggtgaaaacaatagtaacgatgcagagtaaaagtcgtgaagaggaggataattagaggaagaagaggatgaggtgatagaaaagttagtagggatggaaagaagtgaatagaagaattgaatggtataaatagcccaagaagctgttttccagttggcaggatgggatgggacgcgtcttagaaatatatcaaatcatcataaggaagtgcacaccaaaattcaggatcaatatgtggtagcaagagatgagcaatgcacgattacttgctataaaataaagaacgaggttcgtaatatacgttgtcacgcacctactctacctgagatggcttgcgaacaagaaaatacatcaccattggctccgttccaccataatgcgaataatccaccgataccgtatctaccagtcgaaagccaaggctaagatatagcttcaatgcagccggttctgacatcacataggtctttattccttgtcgacctacaactcgctttgcacgagcattctcccgatgcctcggcgccagaaagaagggtctgtcgtcaaataatcaagagctggggagtactatctatcagttatcagcctgctagtgatatatcggtgtgcattttactcagaaatggtccatctggcataattcgaggggctgcttcttcgaggggtgcactgcaataacgcatcatctcccggtccttcaagcctataggccgtccactccgggtgttcgatcgatactgtttctcatagactgcgcgatcggcggaagtcccttcggctgcctgtgcctccaaccaaatatcgcccttctttgtgagaattggacatcaaatactcgatctagccccttttagccattgtggccaaactgattgctcggaagccatgcagtatataagatgataatgatcggtatcaaacacaaaaatcaacagctttccatctttgccaatgccgtatgacttcgataagcaccgataacctcggaattggggtgaaataagacgaacaagtcaagaatcaaacgcaagaaagagggttgtatgcatcgggggccattcatatcgccgataatagtagaacaagtgtcattaccatacagagcactctctagcagcctggctaagcttttatttcaacatcatattaaggaatggaccacatacacatgcacttggtaaaatgatgtaaatgatgttgtctccacttattggaggctaactacacaccgcctcggtattaatatggcagaataaggcggtgtatccacacttttgtaccgggcggggaggcctcggccaatcaacgagctggaaatgtcgatggtatcggagaacatctgaagataaaaaaaaaaaagttacaacaccaacccatcaaatcatgtcgcacatcacagaacatccctctcgggcgaagagaagaaagattgacgatcctaaaccggagaaaacggccgtcatatccaatatcaaatctgctgcttcgttgcgtgaattgttggctgtccagcaaaatgccccgttggcaaagcaaggtgaggcaggtcgcaaaccatcctaagctacaacaaaactgactagcaaataggtataatcaagtttaaagagttcttggtgtcaattgcacacacggaaaatgagagcgaaaaggcagagaaattgcgtgtcctcaaggattattgcgataaacagatcaccaactccggaaaggaggatgaaacctcagtgtgctttgcggatataattcaatcttggtcctttggcgatggcaataacaacgagcctttactcactagcgtcccttctgttcttgcgatcttcctcaagacgatctcgtcggaactggagttccgggaatttggaatcgccctgtgcaagcatttgctacagaaagaccagctgagattgttcaaccgcggtctgacagcaaccaagtctaaagagcacttgatctcaccgtgcctgcgtttgcttacggagatcgtgacttttgacggaggagcagtggcacgacagctgtatcttcggcgctacattacctttaagcgactggaggtcttcctggcccctaacaaagcacaggagatctcaggagatgagtcccacaagtcgacgctcagacgcaacgctcaacgatacctgctcgcaaacctgagagtccagcatgcctccgagaagggtgatatcatcgaacagcacaagattaccaggtctttccttgaatatatccggaaggatccgcgggatactgtattagaaattatcaaggctatcgaaagggacgtggtacaagattccgctctgtcccgcaaatcgaagagcaagtttttcaacagacataatctcgaacgactggtgacgctttatggctatgatcgagagtcagatgaacctaatgctggaggtgtcgttatcgccaatgagatccaccgagtcatgatgaatgtgtgcaaaaccgccgggctcggtgtcctcttgcccgagaccggctggtatcccgtcggaaccgatccagagaccttacccgttgatgatgatacatgcattgaattaggccttgattctcccatatacgtggacaaataccgagagtctatccccgtgcgaaatggttccctttcattcctcattcagtgccttcggcctgatgtggatagtctccagattgaactgctggtttccatcttcagggttgcaccagagcttgttgccgattatttctcaagaaaaactatgtttatttcagacccaaaggccaccccttcgtggatggccgagtcggccttccttttttcaaccgtgcagttgcctgtccctgcaaactgtggctggaaggataaacagcctatcctgccaccgccggtctctgtcgttattgaaaatattctccctcgtccccttggccagaagatcatgacccgctgcctcaaccagaatgcggagatcatcaccttgttcgccgtgcgtatcctgactctcgcattcactaagctgcgggctgtcctcaaaatcttccaggcggatcacggccaaggccaactattctggaatcaggcttctgctaagctgctggcagagttctcccgccgatgccctgctgtcaaggatgtcgttgtcctcttccgaagaacagaaagggaggacctgacccagcaggaggctgttgcagagcttttgacctgttactatgaagtgatgccggacattgctctagaggaaaactttgacgtctccctagttttggtggatgttctcaagcgcctggaagccccagacattagcgcggatgattctgaatcgcttttgagccaacttcagagtatcctccagatcgcacaacaatcagcttcattgcgttggtggcaaaagccagcatccatgcaatactcacccttcacctcgattctcaaggttctcatggatacttcagataaagattcttcgcggcgtatctctactctgttcaagactgttctggttgataactctgttctgcaaagctccccacacgcatttgcatctgtcttatcaagccttgagaattccgaggctgatgctttgcatcagcagctggtcttttttgataactgtgtctcccgtgttgccaagaagccagttcactaccaggacttgctacagtcattatccgaggatgtgtctagaactactagcgcgcttgttgctgccattgttgagcaatggccatttgtcgtcaaaggcggagatgcatctacggaagctgccgttggtgcctggatcgcaagtcttctcggtaatctgaagcaggcgggtgagagtaccaaggtacttaaagctgctcgggatgcgttggttgaagcaactgagaccaaaaagatcaagtctcttctcaagaagtccgtgaaagaggcagatgatgccgacaacgaagacaagatggacattgactctggctctaacgtgcctagttcatccaacaaggcctctgccgttgacctcgatgagatctttggatccctgcccactgaaggcacgacccacaatgccctgaacaaatgggaaagagaggacattgcagaagcagtagaccagggtcatgtcgccgagttgatgctctgcatttgttctcagcacgaagaagtccggagacaggccttcgccaacattattcgcttcatggccaaactcaaggattctacctatgcagaatggcgcacagtgtttactctagctggcgagctcctcgagacagtcaacaacattggcatggagaagcccgttccctggattgtgggcgagtgcgcttcaaactgcctggaggttctcatagaccccctccacaaggtctacggaaaagtcaacaagttcctgcagaaggcaccattatgggaagtcgagaagatcccaacatactgggtcgataaaatcctcttgcacgaacctgagttggatgatgggtatttcgacgagatcgactggctcctaaatctatttatcaaggcactccgcaccgaggctgtaagtttctacctttcagttctatactccaaaagcacgattgctaacacattgaatctaggatatggaggtttaccgacgagctaatgtcttcgaacgcattctttccctctaccagtccccaaccctcggcccagcagctcgacgaaagatcctgcacattgtataccgcgctgcccaggtgggtggcagtactaccctgatcactcgttctggtgtcatcagttggatccagatccaagccgcagaggctgatacgaaggaggctgctcagcttgcagcacttgcacgtgctttgtatgagacgtgtgaccgggagcgggttgatggctggagtaatggaactcttgggcgggtcgttgatgagatccaggcgcaagtttgaggtgttggaatttgtacaatagcagatcgtttggatgattggcgttcttgcctttctgaacatatgtagtacggcagtctaccgccagtccgatagtaaaatttgacctggctcaccggattcttattgcctacatcctccttcacactatattatatggcaaaaacaaaaccaaaaacatacagcagtatgtttaaggtggtggtggtcacggttcgggcatccgacaaagagagaattcttggcgcaggccgttaacgtgcactcatggtgtccaaatcaaattaaataggatcacacgtcaagtctggttgtgctgtatctaccattccctcttcaagcccataaaatccttatcctcggtcacagcatcgcccgctttctcaaacaccctgagaatctgagagttcctctccttaacgttacttaacataatgtcaattgccttcgcggcctgctctccaagaaccatctcatctgcttttgatgcttcatcggcaatctcatgtaaccgcttaagccagtataaccatctccagggactaaatcctccaggtgcccgttgacctagctccgactggacaaaggtgaagccacctgccccaaaggtagtatcggagcaatcattccatgagacatcggataagagtatgatgttatgcccggcttctcagatccaggcacatgcagatgggagtaacgacgcaatagaacgtccaggcattgttcggcgatattcttcgtgttcatcatccggctcattagagctcccaagaggacgctcgcactcgaatgtgtcccgaaaaaggatcagagcaatctggcaaagccgatcgttcgcaatgcgcgtggacgcaagcttcgcaaggaaggacgcagcattaaggcgctgctttgcgttcatttccgcgcagtcgttgatccagcactctgtcatgtccgtcgcaaggaacggcatgtcgttccagactgtcccatcgagagttctagcaatatcgatgccaccgcccggcgccggtctgattagaggcccgcgtccccgcgtccggaggatgtcgaggacccatctgtcttgctcaaagctttcgtgggagacatgcctggcgcattggtaatagacgcaccagagagaatgcagagacgtctcgcaggaatcaattgacgcccggctctggcaatagctcaggcccgtgatccatactctgttatatgccaccgattggaggaggtcgaaattccctgctcgtgcagcttcctccaactccgcccgatccgctcggctgcatgcagcgaagccgccagagctagctcgcggtactgagctcggtgaatctcttagtaaatcgtgcatcctaagttcaggaatttaaagagctggcagtaccgattggtgatgagtgtcaagagggtgaatctctagaaatgagttaaacgtaggagaggtagagtgcaatgggattagacaatatattatttatataaaaaaaaaaggctgactgtataaagaaaatgagaagtctctgtggcagacagcaacaatcttttgcttccaatcagacccgtatgccatttgtgatataccattatatgccattagtgacacgtcgctgtttagggtaggagacccactggggatcagaaaaagatcagcaggcgtgttcatgacccgatatttggggctagatacgctgactatctcggggaatccagcagagttgaaatgacggagtacaatgatgcgaattatagaaatcgaggtaacagttcacactcaatgctggtatagtgtagaaaacaggacaacatatattgaaatgcagcaaacttgtatatgttcctctacagtagctgctccacgatcaccgagtaccaacacggaaatatccgccttgggaagtcacgacattctgacagatacactttctactaaaagaatcaaaataacatgctttactctcaactgtgtcggtgcactgtgcgtagaagttagtatactcctggagcaatggggtcgagggcaaattacctttttgacctcgcaaccacagatagcgttcagcccactatgagttctataatggcattggttggtttccggatagcactcctagtttgaaaagatcaggcccttcgtctcgtacctcaatgaaccttggagatttactcctcggtactgaatctggcgattgttttcatttctggcatccaagtcatttgatgtaggagatctagggctcgctgggctggctaatgcgcccagagcagcagagagggcaagtccagaagacataaaggtaaaagctttcatgacgacggcgtgcacctttggttacttaagaagcaacaggactgatgttttcgaaaagggatttgtgttctcatctaactctggtatatcgggtctgtagtcatcttatatagactcgattccaacccacagtgggagatcttagataggacaatagtcgaaggtctacggctgggtagcaaactcgcaacaatagtaaggtacatgggaacatttaggccattacactaggccaagcgtccctccaaagaaggaatgtgctgcatcaaccaattgcttaaggctagttatgttgttacctgattgtctacaggcgaagtccgcagtggactacaataaagaaaatacatggtctcagtggatatcccctgttggcatcttactggcggacagccaagcgggtaatacacccgtgcattagtgttgtctcaagattgcggcggctcgctggaccctgggagatcgtcgctcgcgctaagctagaaatttacgcccgtgtatgggtattgtcttaaggggattgcggcatagttagcctcgaccgacgctaagcttatagacaatgacaatagtatctatgataaccgtatggtcattgaatcgagtactagtattaatgttcgaagtcatgtgacctctctccgctcccaacaactatgttagtcccagcagataggtagtttccttttctctcttcacgcaattcataagaactttccagagtatctatatttcatccgtagactccttgatttatctctaataggttataagccctcgttcttgaagctactgtatcactgtaagcttcaatctcttttatcctcctattggtgctagcgttgtaccaccctatactagaattcctttttcgcgaattggaatcctaaccggctgagactaacatcctaaccatagttattatactctataatagtgtacttctattactctaattagttgactgttaaccttgctggccgttcgatactctgatttgtcgactattatattcctgactgttcttaaaaatctaagttaatctactgccttaagtagtagatcgctatcctctagcctaaaattttagggaataccgaattaacgacccctaagggctctctatctcttaaccctatcgttagagggttgcctctctttgaagctttatagctatctcttagagattcgactcttaattgtaaaccatttttttctcttaataattaggctattgatagtaagatactagtttcccttaatatatcttcgatttttaaatataactttaagcgttataataaatccgatattaattagactatttgacggaaaaacggtggtaaggcgagtgtattttgtggcagaaaaatcttaataaattctctaactctctaaaactgacaatagtcctaaaacatgacaatctgatggacaacttagtaatcaaaacaaacaaaacaannnnnnnnnnnnnnnnnnnnnnnnnnnnnnnnnnnnnnnnnnnnnnnnnnnnnnnnnnnnnnnnnnnnnnnnnnnnnnnnnnnnnnnnnnnnnnnnnnnnnnnnnnnnnnnnnnnnnnnnnnnnnnnnnnnnnnnnnnnnnnnnnnnnnnnnnnnnnnnnnnnnnnnnnnnnnnnnnnnnnnnnnnnnnnnnnnnnnnnnnnnnnnnnnnnnnnnnnnnnnnnnnnnnnnnnnnnnnnnnnnnnnnnnnnnnnnnnnnnnnnnnnnnnnnnnnnnnnnnnnnnnnnnnnnnnnnnnnnnnnnnnnnnnnnnnnnnnnnnnnnnnnnnnnnnnnnnnnnnnnnnnnnnnnnnnnnnnnnnnnnnnnnnnnnnnnnnnnnnnnnnnnnnnnnnnnnnnnnnnnnnnnnnnnnnnnnnnnnnnnnnnnnnnnnnnnnnnnnnnnnnnnnnnnnnnnnnnnnnnnnnnnnnnnnnnnnnnnnnnnnnnnnnnnnnnnnnnnnnnnnnnnnnnnnnnnnnnnnnnnnnnnnnnnnnnnnnnnnnnnnnnnnnnnnnnnnnnnnnnnnnnnnnnnnnnnnnnnnnnnnnnnnnnnnnnnnnnnnnnnnnnnnnnnnnnnnnnnnnnnnnnnnnnnnnnnnnnnnnnnnnnnnnnnnnnnnnnnnnnnnnnnnnnnnnnnnnnnnnnnnnnnnnnnnnnnnnnnnnnnnnnnnnnnnnnnnnnnnnnnnnnnnnnnnnnnnnnnnnnnnnnnnnnnnnnnnnnnnnnnnnnnnnnnnnnnnnnnnnnnnnnnnnnnnnnnnnnnnnnnnnnnnnnnnnnnnnnnnnnnnnnnnnnnnnnnnnnnnnnnnnnnnnnnnnnnnnnnnnnnnnnnnnnnnnnnnnnnnnnnnnnnnnnnnnnnnnnnnnnnnnnnnnnnnnnnnnnnnnnnnnnnnnnnnnnnnnnnnnnnnnnnnnnnnnnnnnnnnnnnnnnnnnnnnnnnnnnnnnnnnnnnnnnnnnnnnnnnnnnnnnnnnnnnnnnnnnnnnnnnnnnnnnnnnnnnnnnnnnnnnnnnnnnnnnnnnnnnnnnnnnnnnnnnnnnnnnnnnnnnnnnnnnnnnnnnnnnnnnnnnnnnnnnnnnnnnnnnnnnnnnnnnnnnnnnnnnnnnnnnnnnnnnnnnnnnnnnnnnnnnnnnnnnnnnnnnnnnnnnnnnnnnnnnnnnnnnnnnnnnnnnnnnnnnnnnnnnnnnnnnnnnnnnnnnnnnnnnnnnnnnnnnnnnnnnnnnnnnnnnnnnnnnnnnnnnnnnnnnnnnnnnnnnnnnnnnnnnnnnnnnnnnnnnnnnnnnnnnnnnnnnnnnnnnnnnnnnnnnnnnnnnnnnnnnnnnnnnnnnnnnnnnnnnnnnnnnnnnnnnnnnnnnnnnnnnnnnnnnnnnnnnnnnnnnnnnnnnnnnnnnnnnnnnnnnnnnnnnnnnnnnnnnnnnnnnnnnnnnnnnnnnnnnnnnnnnnnnnnnnnnnnnnnnnnnnnnnnnnnnnnnnnnnnnnnnnnnnnnnnnnnnnnnnnnnnnnnnnnnnnnnnnnnnnnnnnnnnnnnnnnnnnnnnnnnnnnnnnnnnnnnnnnnnnnnnnnnnnnnnnnnnnnnnnnnnnnnnnnnnnnnnnnnnnnnnnnnnnnnnnnnnnnnnnnnnnnnnnnnnnnnnnnnnnnnnnnnnnnnnnnnnnnnnnnnnnnnnnnnnnnnnnnnnnnnnnnnnnnnnnnnnnnnnnnnnnnnnnnnnnnnnnnnnnnnnnnnnnnnnnnnnnnnnnnnnnnnnnnnnnnnnnnnnnnnnnnnnnnnnnnnnnnnnnnnnnnnnnnnnnnnnnnnnnnnnnnnnnnnnnnnnnnnnnnnnnnnnnnnnnnnnnnnnnnnnnnnnnnnnnnnnnnnnnnnnnnnnnnnnnnnnnnnnnnnnnnnnnnnnnnnnnnnnnnnnnnnnnnnnnnnnnnnnnnnnnnnnnnnnnnnnnnnnnnnnnnnnnnnnnnnnnnnnnnnnnnnnnnnnnnnnnnnnnnnnnnnnnnnnnnnnnnnnnnnnnnnnnnnnnnnnnnnnnnnnnnnnnnnnnnnnnnnnnnnnnnnnnnnnnnnnnnnnnnnnnnnnnnnnnnnnnnnnnnnnnnnnnnnnnnnnnnnnnnnnnnnnnnnnnnnnnnnnnnnnnnnnnnnnnnnnnnnnnnnnnnnnnnnnnnnnnnnnnnnnnnnnnnnnnnnnnnnnnnnnnnnnnnnnnnnnnnnnnnnnnnnnnnnnnnnnnnnnnnnnnnnnnnnnnnnnnnnnnnnnnnnnnnnnnnnnnnnnnnnnnnnnnnnnnnnnnnnnnnnnnnnnnnnnnnnnnnnnnnnnnnnnnnnnnnnnnnnnnnnnnnnnnnnnnnnnnnnnnnnnnnnnnnnnnnnnnnnnnnnnnnnnnnnnnnnnnnnnnnnnnnnnnnnnnnnnnnnnnnnnnnnnnnnnnnnnnnnnnnnnnnnnnnnnnnnnnnnnnnnnnnnnnnnnnnnnnnnnnnnnnnnnnnnnnnnnnnnnnnnnnnnnnnnnnnnnnnnnnnnnnnnnnnnnnnnnnnnnnnnnnnnnnnnnnnnnnnnnnnnnnnnnnnnnnnnnnnnnnnnnnnnnnnnnnnnnnnnnnnnnnnnnnnnnnnnnnnnnnnnnnnnnnnnnnnnnnnnnnnnnnnnnnnnnnnnnnnnnnnnnnnnnnnnnnnnnnnnnnnnnnnnnnnnnnnnnnnnnnnnnnnnnnnnnnnnnnnnnnnnnnnnnnnnnnnnnnnnnnnnnnnnnnnnnnnnnnnnnnnnnnnnnnnnnnnnnnnnnnnnnnnnnnnnnnnnnnnnnnnnnnnnnnnnnnnnnnnnnnnnnnnnnnnnnnnnnnnnnnnnnnnnnnnnnnnnnnnnnnnnnnnnnnnnnnnnnnnnnnnnnnnnnnnnnnnnnnnnnnnnnnnnnnnnnnnnnnnnnnnnnnnnnnnnnnnnnnnnnnnnnnnnnnnnnnnnnnnnnnnnnnnnnnnnnnnnnnnnnnnnnnnnnnnnnnnnnnnnnnnnnnnnnnnnnnnnnnnnnnnnnnnnnnnnnnnnnnnnnnnnnnnnnnnnnnnnnnnnnnnnnnnnnnnnnnnnnnnnnnnnnnnnnnnnnnnnnnnnnnnnnnnnnnnnnnnnnnnnnnnnnnnnnnnnnnnnnnnnnnnnnnnnnnnnnnnnnnnnnnnnnnnnnnnnnnnnnnnnnnnnnnnnnnnnnnnnnnnnnnnnnnnnnnnnnnnnnnnnnnnnnnnnnnnnnnnnnnnnnnnnnnnnnnnnnnnnnnnnnnnnnnnnnnnnnnnnnnnnnnnnnnnnnnnnnnnnnnnnnnnnnnnnnnnnnnnnnnnnnnnnnnnnnnnnnnnnnnnnnnnnnnnnnnnnnnnnnnnnnnnnnnnnnnnnnnnnnnnnnnnnnnnnnnnnnnnnnnnnnnnnnnnnnnnnnnnnnnnnnnnnnnnnnnnnnnnnnnnnnnnnnnnnnnnnnnnnnnnnnnnnnnnnnnnnnnnnnnnnnnnnnnnnnnnnnnnnnnnnnnnnnnnnnnnnnnnnnnnnnnnnnnnnnnnnnnnnnnnnnnnnnnnnnnnnnnnnnnnnnnnnnnnnnnnnnnnnnnnnnnnnnnnnnnnnnnnnnnnnnnnnnnnnnnnnnnnnnnnnnnnnnnnnnnnnnnnnnnnnnnnnnnnnnnnnnnnnnnnnnnnnnnnnnnnnnnnnnnnnnnnnnnnnnnnnnnnnnnnnnnnnnnnnnnnnnnnnnnnnnnnnnnnnnnnnnnnnnnnnnnnnnnnnnnnnnnnnnnnnnnnnnnnnnnnnnnnnnnnnnnnnnnnnnnnnnnnnnnnnnnnnnnnnnnnnnnnnnnnnnnnnnnnnnnnnnnnnnnnnnnnnnnnnnnnnnnnnnnnnnnnnnnnnnnnnnnnnnnnnnnnnnnnnnnnnnnnnnnnnnnnnnnnnnnnnnnnnnnnnnnnnnnnnnnnnnnnnnnnnnnnnnnnnnnnnnnnnnnnnnnnnnnnnnnnnnnnnnnnnnnnnnnnnnnnnnnnnnnnnnnnnnnnnnnnnnnnnnnnnnnnnnnnnnnnnnnnnnnnnnnnnnnnnnnnnnnnnnnnnnnnnnnnnnnnnnnnnnnnnnnnnnnnnnnnnnnnnnnnnnnnnnnnnnnnnnnnnnnnnnnnnnnnnnnnnnnnnnnnnnnnnnnnnnnnnnnnnnnnnnnnnnnnnnnnnnnnnnnnnnnnnnnnnnnnnnnnnnnnnnnnnnnnnnnnnnnnnnnnnnnnnnnnnnnnnnnnnnnnnnnnnnnnnnnnnnnnnnnnnnnnnnnnnnnnnnnnnnnnnnnnnnnnnnnnnnnnnnnnnnnnnnnnnnnnnnnnnnnnnnnnnnnnnnnnnnnnnnnnnnnnnnnnnnnnnnnnnnnnnnnnnnnnnnnnnnnnnnnnnnnnnnnnnnnnnnnnnnnnnnnnnnnnnnnnnnnnnnnnnnnnnnnnnnnnnnnnnnnnnnnnnnnnnnnnnnnnnnnnnnnnnnnnnnnnnnnnnnnnnnnnnnnnnnnnnnnnnnnnnnnnnnnnnnnnnnnnnnnnnnnnnnnnnnnnnnnnnnnnnnnnnnnnnnnnnnnnnnnnnnnnnnnnnnnnnnnnnnnnnnnnnnnnnnnnnnnnnnnnnnnnnnnnnnnnnnnnnnnnnnnnnnnnnnnnnnnnnnnnnnnnnnnnnnnnnnnnnnnnnnnnnnnnnnnnnnnnnnnnnnnnnnnnnnnnnnnnnnnnnnnnnnnnnnnnnnnnnnnnnnnnnnnnnnnnnnnnnnnnnnnnnnnnnnnnnnnnnnnnnnnnnnnnnnnnnnnnnnnnnnnnnnnnnnnnnnnnnnnnnnnnnnnnnnnnnnnnnnnnnnnnnnnnnnnnnnnnnnnnnnnnnnnnnnnnnnnnnnnnnnnnnnnnnnnnnnnnnnnnnnnnnnnnnnnnnnnnnnnnnnnnnnnnnnnnnnnnnnnnnnnnnnnnnnnnnnnnnnnnnnnnnnnnnnnnnnnnnnnnnnnnnnnnnnnnnnnnnnnnnnnnnnnnnnnnnnnnnnnnnnnnnnnnnnnnnnnnnnnnnnnnnnnnnnnnnnnnnnnnnnnnnnnnnnnnnnnnnnnnnnnnnnnnnnnnnnnnnnnnnnnnnnnnnnnnnnnnnnnnnnnnnnnnnnnnnnnnnnnnnnnnnnnnnnnnnnnnnnnnnnnnnnnnnnnnnnnnnnnnnnnnnnnnnnnnnnnnnnnnnnnnnnnnnnnnnnnnnnnnnnnnnnnnnnnnnnnnnnnnnnnnnnnnnnnnnnnnnnnnnnnnnnnnnnnnnnnnnnnnnnnnnnnnnnnnnnnnnnnnnnnnnnnnnnnnnnnnnnnnnnnnnnnnnnnnnnnnnnnnnnnnnnnnnnnnnnnnnnnnnnnnnnnnnnnnnnnnnnnnnnnnnnnnnnnnnnnnnnnnnnnnnnnnnnnnnnnnnnnnnnnnnnnnnnnnnnnnnnnnnnnnnnnnnnnnnnnnnnnnnnnnnnnnnnnnnnnnnnnnnnnnnnnnnnnnnnnnnnnnnnnnnnnnnnnnnnnnnnnnnnnnnnnnnnnnnnnnnnnnnnnnnnnnnnnnnnnnnnnnnnnnnnnnnnnnnnnnnnnnnnnnnnnnnnnnnnnnnnnnnnnnnnnnnnnnnnnnnnnnnnnnnnnnnnnnnnnnnnnnnnnnnnnnnnnnnnnnnnnnnnnnnnnnnnnnnnnnnnnnnnnnnnnnnnnnnnnnnnnnnnnnnnnnnnnnnnnnnnnnnnnnnnnnnnnnnnnnnnnnnnnnnnnnnnnnnnnnnnnnnnnnnagtcacgtgatccaactgtatcagggatgaaaaatgacagtattcatcctagattctgacactattcctaaacttaagggagaaagtaactttgctatatagtagtactgtctatatatagccttaaaggaaaataataaggtatatattaaaattatcttagaagataatataaagcctttctatcctaactaccttaactatagtaaaaatgttattcgttagctagctcttattaaagttagcggtaagatagaactaattactccgcttattataaaggaaatggttaaggaacgataaaacgaaaataaaaagctatataatacctattaaaaggaacttaataaataggattagtataatacttaagcctataatcttatttttagtacccttaatctaatcctagcttcttatattaagtagactaatattacgcgagaaattatttagatccttataagagaatatagtatactattatagtagactaactttaaatacttcgaaaccctctgtaatctttagtataagggaaataatccttaggaatttattcgctagtttaaggaagtactctttaagatttactaaaagagatcctctttagatcctataataacccttaatttttttatctatactatttagagtaatcctcgctattaggtatttatttaatccttaaaacctgatcttagtaatcactattttatagtagatatctattataagtttatccttatagaaggatctataaaaattgctagtagaggctacttaagctataatccttctataaatataatatctacttaaaaggatagtttatcctactctaattctaataataagaagaaggataataagaagggatagaataataataaaaagggatctttaaataataataataattctaataataatttttccgataaaaagctaaagaagaagtaatagtataaaaaagaggaggatattattttatatactatttataatactcttagaaatcactacttaagaaactgccctttaaggaataagtaaagagtagtgaatataatttattatacctaaccttagtagtttacttaataattaatctaataagtccctattctataacccggttagattattagctaagtagatacttaaggatagattatccctatttagtaatactagtaatagccttaactaggagtaaatatagtttatactctatatatagccctatctagtttatagtaaggacccccttctagtaacccctttaatagatataataacctatttactaatatactattctaagtaaatactacttatagttcctattctatttctaaggaaggataggctgtaagtaataataataatatttcttactagataattgacttaggtataagtacttatataaccccttattagttagtctttattaattttagataatatatattccttatcttaatagtaattagtaaagtcttttatatagaaggatatagagatattattctctaacttcttaattataatataactaattatctagtctctcttactctttaaaaagtttggcttatactagaacttaagtctagccttatttctatatctactcttaataaagtagatattagtacctaggtaaagaatagtattataatatttaagtactaagatacttatagttctcttaagttaattattagttatatactctataaaggagaatattactagctaaattattatagtattctacaggacggcaagcggggcgccagaaatggctcccattgccccgttttcccgccactcccgaccgcctgcccggctccgccatccccctgccccttccggcatggcgtccactgcgaccgcccaaccaggtttagcgccaccgaggccgcttttattgcccgacgcatccgttcctccctctataaaagaccactcgccctcttgtcaagtctcccacgcactttcactctccttgcccacccgaccccctttcttctcgcccccaccgaccccctttcttctcgcccccaccgacctacaacgcattggactcatcatcctgacgcactgccccttccgtttcaccggagatgccgctgcttccgatcctcagaccgttctggccagcatgggcgacgacgcgacctcaacgcccaggggcatcggctccgaattgatcagtcctcagtggatttttgaccaatattgattacaacagagcgacaggtgctctttgctacacaaattatccagatcgcttcccaccagaactcattgcacatcgagcctgtgctatctatcctcttccgccgacctcgtacgcctccatgaagtctccgaatgacatctttgatgacatattccccgcttccatctgctccttcgaggttacattgcacagctctcgtccctgatatactagcgtatgcttgctcacgactgccaagcgttcttttggcgtcatcaatagctcttttgggacccgatgcacacagccgagaaatcttcgactacacagcttggtatcatgagccaatagcgaaaatccctcagctgcacctgactcctgagctagcgattgcagccagaggcggatgactctattggacggacaatatgtggattcttgtcgtcgggaccgtcccctgtggacatgagattggaacccctgtattctcgcgtcatacatgtgatgtggcttccaggagaagagtgaaaccctctgcgctgcgcgaaagacgggctttgtcgcaaggatgagtgatctccgggtataaagcgaccttcaattccgcccctatggctgattgggaattccaaaccccttcccttcttctgcctgtttcttccctctctgccaataccccaattctcagtcctagtctcattcgatgagccctgccagtcaccatacctgaaaaccctttcaaaccccctgctccgaacatgtcaagcgccgatttccgcgtggaatccttccggccttggaatcccccccaaggaaaagcacagtctctgcggaaccctctcaatatctatcgctatccaagtcctgtctccctcggtgccacgccgcctccctctactgtgatggacgccactttaaagagtcagcaaatgtatgctcccagaactgagcgacatccccttcctgttcgcccaccggtggaggtttgtttgaatggcggtccaccaccggactctcagatcaatcgacacgagccggaggccttagagcgaacatcatctattagtccttgtcctagaactttcgacttcgaggacatcctacatctgcaagatctatcaaactctggagatgatgatcattcaatgactttcggtcattctggccagaccttcgatcctcaaccctccgattttgaatcgggcgacctggagcttgctttcactgctggtcagcactctcaatttggggttactggaggccttagccagactggactgcttctaaaagaagcagcaattgatccggcaattctggacgaccatcatttcccagctatggagcagacccaagcaacagaacctttacctgacgtcgcaacctgcccaggcagatcatcagctgaaaactctcgcctttcggataaagatgcctctttccatggcaggcaacataaaccgaagaggatcgtgaaatctggtcggcagccttacaaaaccaacaatctttcagttgttatagaaagtcgcccaaagtctacaaccggtcgaccttctcaagggctcgggcgtaagaacgtttcgttttctatcgttcgtgctcaattctctgccctttcggtcgacgaccgattacagttcctgtcctggctgttcgagggtgccttagctcattgccttactacgccttcgagcacaaatgatgccgctgcatcacgatccatctcgaaccaggatgaaaacatgacacctaagtctaaacacttgggtaaaggggccgaaaaaatcgatgcggaacatactcgttcctcgagaaagggattacgatggtccgtggaagaggatcatctactagtgaaactcaaggaaaaagaaaatctcgcttggtcggaagtgttcaagcgttttggtcaaaagttccccggaagaagtgaagggtctatacaggtatactggagcacgacgctcaggaaacagcgactaccttgagcggaagactaatagcaaatgccatccatcgctttgctgatgaaggccaggaggcgtgcatctcgtacatgtttacctttaacgcaacctcaatgacccctaatattggtcagtggcgaccatctagtggttgcttgaatcagctgatgcttcgtcatgacgcatagcaaatggagagcgagctggagggtcatagttaataggcgcatgtgtttggcgtgcaaactgatgggacactgcacgtcctctcgggttccgcaacgtaactggtattttacggatgaatagatcttggctgaataaactggtcgaaactccacgtcaaagcaacattgcttggaggtggcggctaggcctgttccaagatctgagggagatctccccaaccaggattcagcttgctccttggagacagaactccacctcccaggtgggcatagttgcttttttcaatgatcacaaaaacgtgtttttcattgctcagttgcccatgtcggccgccagtgcgatactggaacacttttacgctgtatattgccagaattgtaagttatttctctttctaatgacaagacaccgaattcaggcagcgacggccctggtacttgatgactagaaatgtttgcatggaagtggttatgactcgccgggagtcgctccatcccatgttcatacgaaaaaggtcaaacgaatggccgtattcctgcgcaaaggtgcctcatcctcaattgttctttggattaacggggacttaaaagcagactgaacatcatctaagatacatatctcttcccttactgtctaacgccctcccatctaaaagcgcgttcggctcgaacaactcacggtctcggctcgacctgggaaatgcggactatcactggttctgctgcaccatatgttaattcatgccatgccacgtcggtacaggtcgaccaaccgagaggtatattttcgcatctttgctggatgcctctgacttgaaatatctcaccaagaatcattctatctggcttggatctttccaacagcttgacctgctttgcctcttgtcctaatgcattcaacgatgagacttcttgaaatatggtggcaatatgctgcaccctcatatctgtcaaggttagaaagtggcgtcaagaaaacgaaaggtctcctgtttcctactgtgagtcattggtcccatgcccaggtggtccaaatcgcctttcttgttctttctggatcgaacccaaattttcctccatttcagcaaaacttgcgacagtatgcttggttcaagtgcacgaaatgctgtcgcaaaataggcttgtacttgaacagtatctttgatgtcgatgggatgaggttgaatcaaagctgagcgctcatcctctatagacaaaatcgcttcaagatttgtgagcacaattttgagttcgtctaaccgaatgtcgccatcgaataagggcgatatttgaagccggcgaagtatatcattaacaaaacccatgtcaaataaccatggatcgaccgattgatggttactgagattggctattcccgaaaagctgtagtaaatgagtgctatgctggctctactcccaaagggcctcctagaaggggtttgccgcctctatagcatgaacccggaacaagacgattgaagtgaaacttcgccaagcttgaagagcatatatccgaggtaggctttcaaatcctccactgaaaacgcacgaaggcatcccgcttctgtgagaaggtttcgtgctttcatctaccaaccctccacttgcatatgattaaagctcccaggcataaagccagcctcctattgcttttctcccctagtgatgacgcgccgaagcttagcttcatcctcgagggttgaagatgcaatgaaaagatagtttagtattaaaatcatctgtataacactataccgaactttgattatgttttggagagcgaagggcgagcaaatggctgaagatgaaggattcatctttaggtagggaaataatgaaagttgattttgggtctttagatgtgattgaaagcatttggtggcgatgagagctttttgtatagcaaactaaccatagggccactgttggattgcttttatgataaagaacatacaaaaagttgagctctactctacgaagagcctatttctctaggctaggtgtgaaacctcagatgtactgtatgaatattcgcagtgttataactaatcaatccgatatatttgcattttattgctttttactccttcatattactcaccggtattgggatccataaaattagcaaagctagagagtggctagcagaaacttgtgtgcaaaaattaccgaattgtcagctatttcatcttgtgtattgctatacatttttggcgcttcttggacgctttttttcagccatgcaatggtatcctaacctcggtgttatctaaagatatttctgtcgatattgaatcatctcttggcttttaatgtctgtatcttctaggctctctatattcctaaatatgagctccaaggattataccacttgttttcataagtttacctgactggggaattttactcttagctggaaagcggtaactcgagagagcactatgaaaattgaatcagataaaacctttttggcctggagaactttgctgcaaactgtccgaaattccttctgttcggccaatgtgtaaatgcctataagccattaaatatcaaaagtcaactaacgtgagaatgaagtaaaacgagaatgagtcttgtggaggcttggtcatttgacttacatttggcaccatctttaaggatggctttttatcaaatatgtaattggactttcggaaaaccactgttccccggttctatgtcaataattctgcctttgacaagtctaatgttcggaggaatatgagggcgcttaatgatttctctatccgagttgtaatctgattgcatagaggtgtttgggaaattgttttctgagggataagaacatacaaaaagttgagctctactctacgaagagcctatttctctaggctaggtgtgaaacctcagatgtactgtatgaatattcgcagtgttataactaatcaatccgatatatttgcattttattgctttttactccttcatattactcaccggtattgggatccataaaattagcaaagctagagagtggctagcagaaacttgtgtgcaaaaattaccgaattgtcagctatttcatcttgtgtattgctatacatttttggcgcttcttggacgctttttttcagccatgcaatggtatcctaacctcggtgttatctaaagatatttctgtcgatattgaatcatctcttggcttttaatgtctgtatcttctaggctctctatattcctaaatatgagctccaaggattataccacttgttttcataagtttacctgactggggaattttactcttagctggaaagcggtaactcgagagagcactatgaaaattgaatcagataaaacctttttggcctggagaactttgctgcaaactgtccgaaattccttctgttcggccaatgtgtaaatgcctataagccattaaatatcaaaagtcaactaacgtgagaatgaagtaaaacgagaatgagtcttgtggaggcttggtcatttgacttacatttggcaccatctttaaggatggctttttatcaaatatgtaattggactttcggaaaaccactgttccccggttctatgtcaataattctgcctttgacaagtctaatgttcggaggaatatgagggcgcttaatgatttctctatccgagttgtaatctgattgcatagaggtgtttgggaaattgttttctgagggatgaagagtgagaagtcaatatcaagggctctgcgcgttaagagaaaactcactaggacgatttccagatccaccgatgtgtagagctctgctagtctctatttccttttggaggcatactggtagaagcctttcggggctagatgcagatttattatgttccagcctatataccgcgtgttcagttcgcttgtacggggtggcagtatttaggatcgttggctctaggccctggtctgtttcttgctcgtgttttggtctctaaagagactctatccaatttggaagaaacaatcggaaggagatagcagaaaggtaagacatgaggctaaattgatatacagctttgaaacctttcgataagtatggtaaaatcatcaataggaacggaaggctttaagcatgggctggtgttcttttaatatatccaggtggtcatataaagactcctttctactgtcggaggaagctatctatcatacattttaattaaataaaaaggatttagtcatggtgagtatccgtgcctttgacccgtggcgatgatatactcacatcataagcctgccccgattcctgtccaattcttgtatggaccggcaaaagtcgctctagaggcaatgatctttttgagaattgattccccggtactcttgaaatggacaccttccgaaaactccagccaagatgctagaatgctgctagacgcctgcaaggctttgaggaacagcaggtctcgggaaacgtatctggatgagaacatttctcttgaggaaggcttgcgcgccttcgaggggaatgttttgcacagtctcagttatagtactgttctaatgctagtactgatgacctggcatttcgatgcttcgtcttctgaagcgtcgtggggcttgattgctttcttgagacaaccttacgataatgaagtgaggagaatactccaaggtcgatactcaagcattatgcgtgagacggccccttcgaacttcgactttttgcttgtcctgaattgagtctatctggtgatcagagaaattgcatagcatgaatgggtttatatgtatttaatcaacggtatccaagctctttcagacggttaccaatgtcttggagatagccatcataccagtcccttaaggtcccttgcatcgcatatcccaaagcttctgcgagctgctgcctttttttatactcctgtaggcattttgaatgtagacgctggtaataaagagctttcttcgagttaaggtcttcgactggttgttgcaaaatgattggatcattgctgctcaagggaatgaattctggaatcctataattcccccaaacccgtgagatacccgtctccagcaccgcaaggtccactaaataggcaccgttcttgttgcgatggccgtcctgggcttggtgctgagctccgaggtcctgaagaccgatagcatcaaaaactacaccttcgaggccctttcttttgatgtcatccgtaagttggagcccattgtgaggaaaccagattcgcactgtcttggttggttagagctcggtattaacgcgaagaaaagtgaaccttacatgcaagcgaatcggtgccgagcctttggcagagagaccagagcaaggattggcgtcttccgcagattcaagcatacttttttgattgggttctgggcctccaaataaaagtgtctcgcgtgagctgcctggggaggagaagaggcgcggcatgcagcgcgaaagcttacagcgagctttatgtagactcaagcagaccatactaactgccatgaaatcccacagtcgaatgagcctgaaaatccccagtcactttgtagtacaaaaaccaaaaatacttgagctcttttcatcagtccttttacttttcttttatttttgtatcccgctagttacagagctaacatgttaaagtctcgctgcagcttattaccggattgtgcgcgccgcaacgcggtcatgcaacagcctacaagcaccaatccttgggtaagacaaggtgggtaaaagcgccatatcgatagtatctctagtgaccttggcatgatctctctagtgtcatacgccattcatgcatcatgggtcgaattcaaatatctggacttgcactcgccggcttcatacacactggccgctatcagtggctagagagcaaatcggccaaggaagaagggatagattgcatgtgggcttatccattgggcagatgctccccgccggggggggggggggggggggggggggggggggggggggnnnnnnnnnnnnnnnnnnnnnnnnnnnnnnnnnnnnnnnnnnnnnnnnnnnnnnnnnnnnnnnnnnnnnnnnnnnnnnnnnnnnnnnnnnnnnnnnnnnnnnnnnnnnnnnnnnnnnnnnnnnnnnnnnnnnnnnnnnnnnnnnnnnnnnnnnnnnnnnnnnnnnnnnnnnnnnnnnnnnnnnnnnnnnnnnnnnnnnnnnnnnnnnnnnnnnnnnnnnnnnnnnnnnnnnnnnnnnnnnnnnnnnnnnnnnnnnnnnnnnnnnnnnnnnnnnnnnnnnnnnnnnnnnnnnnnnnnnnnnnnnnnnnnnnnnnnnnnnnnnnnnnnnnnnnnnnnnnnnnnnnnnnnnnnnnnnnnnnnnnnnnnnnnnnnnnnnnnnnnnnnnnnnnnnnnnnnnnnnnnnnnnnnnnnnnnnnnnnnnnnnnnnnnnnnnnnnnnnnnnnnnnnnnnnnnnnnnnnnnnnnnnnnnnnnnnnnnnnnnnnnnnnnnnnnnnnnnnnnnnnnnnnnnnnnnnnnnnnnnnnnnnnnnnnnnnnnnnnnnnnnnnnnnnnnnnnnnnnnnnnnnnnnnnnnnnnnnnnnnnnnnnnnnnnnnnnnnnnnnnnnnnnnnnnnnnnnnnnnnnnnnnnnnnnnnnnnnnnnnnccgccaggggcccaatcatccttgttggtggctctggtattaatttctttctcagctctctcctcaaagttgaaccatctcttctaaattatactgtcttaatccatgaaccaacccccttatccatgagatggaatccagcaacgatttccactacgtcgccgatttgaagaggcacatttgtcaccttgaggagatactgagagagtggaaacgttatgtcccacaggatgtcatcttgcgatctcaaataccactcgaaaccacaccatctcatcttcttcaacctcaaatctctcaaactctttcagcgacccagtgtagaaggcatccgttgtcaggtacatctgggtcagaagaaacatggaaaaagcctttacgaactttcatcaacagaattccttctgtagaaaaatggcctggcacagtattacccccttaagtttccgttttgaacttgttattttaaagcgaaactctcttaagagacagtgattcgccgacatcgactatctaatatcgacattcagatatcatccaaaccatcggggcttttgcttccctcgcacaaaaatgtgccaacgatgtgaagtgggcgaaatacattgtatcatatcagaaattactgttaggtgcgctttgtcatattgcatgttgcctcggcgtggacccaaaatcggtggacaaaacgatgaacttgatttcgaaaggaggtcccgaccatctccaagaacttcggcatggagcagcttggggggtcaaggcaattgaccgccttcagacagagagcaattgggatattagaagtggtgacatcttattttactgtcagggttctttgtcgataattttcatatggagctgaccagtgagtctagttaccccgacctttacttctttgaggtactgggcgaaagcaagtcaatcgatttcaatatttaccacctgtttgaaagaagatcaatatacaacacaccaagagagtttgcacacaaaccatctctctgttccgtgcataatcaagtgcatattcggcagaagtgtccagtacgtatatttaacgtttctcgtggcgctatctgctaacaatcagcccctagactctcggacgtgtgcaatgctttacactgcaattttgatcttgctcgaaaatcatttgcaaattggtacttagggtcatttgggtcagatgccatggatgagttggaaaagcagaggatcttctttcccaaggcatacttctccttgaacagggagacggaatttggtgaaagccagactgaaagggactcgcaacccgcgagagactccttgcgcgagtcgcagaaaagacgtcgtattggcagcgggccaaattcaaatcttgacagcttgtctctcactccaactttgtcagccaatgtgcaagtgcaggcagcatttcacgaagaccccaatcgttcccttccaagtccaccaggtgagccatctagaaacgagatcccataacgtgatgctgactcccacagaccactatagatatacctcgagcagaaatgcaagctctctgggggtctcacagcaagaaacacgagatcaacggcttctacttgctaatctggatcaacaatgtgcaatcgacgggcgtcagacggcatattcgcttccccaaatcgcggaagatgaatcacgtaagttcttcattgagtggccaataaaataacgactgaaataacatacagatccatgccatctgaatttgacgggtcctccggattttgcagatgtagaagccctctcatattcccttccctccttcaatgccatatcggagattccatttttaccgctttccgagttttcagctccccaagaaacggtggtgtttccctctccttcacttgactactccataccatccttctcccagatgacaggtatcccctcccctaaataaccacgccatctaatcgaaatgactgtcaaatagtctctttgctccatgtcaccacgcagacacaagagttcaaaatctctatcaatccactccattctattgagtcatcgtttgctagcgggatatttgcatcatgattgacaagagaaacgatcgcattgtcttcgtgtaggaggattgctgttatagtaccatagggttcccgtggagatgctccgttcgtaaagtgtatcaaactggttttcatattctggcccaaggtcagctgcatgcgacatgaatgaaattaatagcgcgaaatccgcacctgcttttgaaagggctgaagaagatctgccggaacgtttcgacataatctcatatgaggcgcatcgtccttcgctgaaaattcggccttcggtagccagttcctcagtttgtcgcaaggatcctgctcctgttttttcgcagccgatcggaggtaagccatgggtccattcactgaatcgtcacttgcgccgctattgagtgcacatatggtgtattgcttgactgggttattttggtcgagataatcggcacgacccttgcgccgtgaggcggggttgggcataacggaatggagcacgtgaaaaattatttagccccaccatggagctcttccagttcgacagttgggaatccaattataatttacaaaatttgctctatggataatcttccctcattcccacgcatgctttcaacaaggcaattgacggggactttcctttgcatattcaagaatctgccataaacacccgtaaatcctgctatactcagcactactaggaaattgacgaaggctgataccgattggcttttgctaggtcgaatatcatctataattaacgtaatttttgccaaggatccgcagtaactattgaaaaggtcgtagagcagtataggctaggaccgaattaacgtggatgtgatttgctttgcgtgtgattcgtgtgatatgccctgccgtatgcagatgacgtgggctgtattgcccttctgattttgacagccgtcgtgtgatataagcgtgtagacgctcggtgatagactgatcagaatatctcggtcgttattcgcgtcagccaattcttgctcagtgagcgcaatttatgcgactacctcggcacatttcctgtttacaatgattgtaatagtttatgcgtgggggctcccgagccctcacgggagggtccgcaattggtccgactccgtaactattaacacctgttaacaattacccctccttttcgttactccagcgttcatctcatgtttttagcaagggccatcagttcgatttttatcttattttaggccgattcacgttcgttcgtgacctcacagaaaatgaaatataatggcgcagatggccttgaattcgaggcaggcaataccaaaatcgacccagctgtattgcacggtaagctacaagccccagcgacctcacaagatctttttcacattgactgccctaccagaactgcccgaaggatgcagggtgtcatccaccgagaaccatggcgtaagcttctgggcgcagacgggtcgtatcgatgtcttgctccgcaatggtacaccgcaatccttcttcatcaaggtcatttcgaaaggactaggcatggatatgaccaggggcgaatttcagtcaatgagcgcgatccataaatttcttccagaatttgtcccaaggcccatcgcttgcggcacctacagcacgataccagacacccacttcttcctctgcgagtttcgagaaatgactgacgatatgccggatccccacaaatttgccgcccttctttcaaagctgcatcagcaaagcgtatcgcctactggcaagttcgggttccatataaccacctacgcaggaaacctaccccagttcgtagcatgggaagagagctgggaggtttttttcgccaagaccatgagacaggcgcttgacctggagattgaaaggaaagggcctagtgaggagctcgatgtcctctccagtgctttgttcgaaatggttatcccaaggctccttaggcccctcgagagtgacggccgaacagtgaagccttcacttgttcatggagacctctggtacgcgaatgcagggattgatgtcgaccaagatcagcctctcgtcttcgatgcatgcagcttctttgcgcacaacgaatgtacgttctcctacgaaaaactcgcggttgctcgcactaaaatttttaattttggagatgaatttggtcagtggcgaccagcttgcaataggtttggagacgagtacgttgctgcctacaatacattcgcccaaatttcgccaccggaagaggatttccaaggccgtttagacctctataggctgtgagacacccagaagctctttccctccttcctggtttgtgtagctgatatcaagctaggaggtttgacacacatgtttcagcgctttttgtcgataacgagacacttcgcacacagtgagtctattccatgcctgcagtctagttttgcggctaatgaacttaacagggtccttgatgtgatgagagatttggtacagagatatggttagtggacaggagcaatattagtatgtactttttctaccgtgtagttctaggaaagtgcgtgctcggaggaagtctcggccacaagcataaaaagccgcaaaagaataactgaaatcgatgagattgaactatctagagctaataaagctgatcaagaagctagagtgaatgtgggaacggggatctcgtcccgtcccacaggattatggctgggcagtttccctatcacattcccgtaagtggtgatctgtatggcatctacgttttggtttgggggttagatatatcccttcacattagtctcttactttatagatactcttttagtcaagtccgccccttatcaccgccaggtcgccaccccgagttaacataatatctctctttgccaaggcacaaacaatgtccttccttccagcaaaccaatcgtatgggacgaaaaagtgctcaaagacctcgatggttgggggatctttgcgttgcgcgatctctagctcgctgatcccaacagagcagatccaaaacgaccggctcaagaatatgagtttcttcgattcgtcaattccgatgacatgtgcaacgcttagttcgaatgcagtcatccatgaacgatgcggagcgaccggactcgatgtcgtgagcaagttttcatcgtcttcatctgtggcgcattgatctaactgcttccctagcaaaaagctgctgtcgttgttttcgatggaaaggcagtctgcgtcaattatcgcaatcatgttgatgctcgcggagctattcggatataacaagtcaagtatgattctttgtttttggccaagtgaatagaagctcgcgcttttgatctctgccgtgtcgttgtccaacgacagtgcaatagatgaaacttcagaccagtcgctccagcagtaagcgctgattttgacattgtcgacacagaccatatgtagggaagattctggatgagagagccatttgcgaattcctggcactagcggatatgtccgctctctctcaaacttaccgctgtccaagttgaacagataatcagaccctcgagtggataccaggaacttcgccgctagttctcctactagcacatctatgattgccttctcggagtcgaggtgggacttgaacagtaccgtcgaatcgctgagccaacctttatctgctgacttacgaattctgtgtgcgaagatcctgttggaggcatcgatgctaaggagggcatctctccgttcaatccagaccaacaggcggactggtgatttatggctgtagagaatccccaagctcgctaccattttccgttcgtacagtacgactgatccatcatcctttccgcaaaagatgacttcgggcgtgtgatgaaccgccatggcagtgatcttcgctttggcttccatggaaaccgtctctaccactgtagtgaaagtggccccactgctgtcatcacttatggaccctcgcaacaaagcttcaggttcccagacagtgcactgggcgcctcgtatgtcggcaagaaacatactgtctctggtaaaggcaagctctttgatataagagttggatgacttgacctagtagagaagcttaaatgtatcaaattcgtaaacgtggataattccatttgcaccacccgctgcgaggagacgcccatccggacttggggcgagggtttggcagttggcacgaaaacattccagctgcttatctgcaaagggatcaagaagggctagatcaccatccaggtatgcgaccgcgagaaggctgatatcaggattggggttgaaagcaagtgcgacgacgacatgcgtgctggtatctccgttggaaagtttcttgccacagctaccagcgtaggcgtcctcttccatgtcccacagcacaattagccggccgctgtaagcgacagcaagcattccttggttggtagaaagagtcagtgcgcatagggccccgcgcggaggcgttcggttcggcgtatcagtttcgtaccatggcctccgcaccgactccggccgggagctacgtcctaaatcccaagttgcgacgtagttgttgctactcgcaatcaaaagcatatctgcatcgaattccatccccatcggacgtagagggctcgcgaggctgtgaaccacttgcccacttctgaagtcccagaccttgaccaacttcataccacaagttgccaagaggtcagtcttggccttaaaagcaacgaacttaattgcttctccgtgctccaaaaccttgtactcttggtaggttatggcgtagtatagtacgacatctcccgagctgagaccaagggcaaggaaatcgtccccatagcacaaggcccttggttggccttgacggaagtcgatacacagcagcctgtcatcccattgcttattaggcgcgccaagcactgcgagcctccggcctaggctcctagtgttgtaaaccatagaatcgatcggacagaatggaggtatcaacgagtatattgctaatagtgatactgcaagggcgttggcgaacatggcaggaatccgagcgagatccgtggtccactgtcgtagcgcttttatccgagggtccagtggtaagcgctcaacggcgcacgcattgacgtacattttgagatgctttaaggcgcggatgaggtgattgagatttcgagactcggcaatcgcctcgatccaagtgaggacgttggaacccaagaactacatgacaagctggaacgtcactgcgaccaatggatcagccctcgagaggtgatatgagtatgctgtatatgcataggcggcaaattctactcttgctgctggcaaatttgccgaaagtcggcgtcggctgttcctccgaggcttcatttcctccccaattaggtaattgagacatacctgagccatacgtgtgtgcgctttagtcctatcgatggagaactcggactcaagtccgccgtctacaagaaattctctggcagtttcatgcaccatcttaaccctcccatatttgtccacgaccaccagttaaccgcagagcgctacgatgctctcctccaatcttaggaatgaatcgtggatatccagagacagagcaccgcccagttcgctgattgtcattggtcgaatcgcgcatgctgcccaaatgagaatggttttggccagctcctttccgcgaacggcctgtgacatatagtctaaagtgcgcttatatagagactccatgcctctcgggacattttcaagaatccgatagatttcctttctgctgtggcagcgcaggagttcctcaagcaccaatactgtccataagaaagaacccttagatttgtcaaggatcttctcggctaaagtatctcgttcgtcaggtccaacgattcctaagtcctaggtcctcctctcaaccaaaagcctgaggtcaaactctgtgtcttttatcgagattggtaaggactggactaggttagatagaatgacagagaaaccttgatccagatcgactgtattccggcttgtgacgaggattctcaagggcatagatttgtccatgttggaaagaatggcatgtaaaagaatatgaggattagagcattcgtccaaggcatcgatgacccagtaataacgagtcgttgtggtctagaatatgccagaaaggaacaaaattctccaaagagtacgttcctcgacgcgatctaagcaaacaccatccgcttgcatccctaggatggcatcacttgcttcggcatcggagctacccatctgaaaagccagggaccggagacaacgacctaggttagacttcgacttatctccatgcttgaagaaaaagtagctgcatgcctggccggactctttgagctagtcgatgacatagccagcgagaacagatttcccggttgcgggcttgcccttgatccatagcgtcctgtcatttccggattccccctctctccatttgacgtaactggctttcgtcgatatccatctgcacgacccgtgcagccgagcttcgcaaacgtttgcaaaatcatcgtctagcatattgaaaatttcaagatagttcttgagacttttgatcctctcgcgtctctgcttcagcttcagctctgcgatcgccgtggcaatcttgctaacagtagaggcgagcgcatttcgtagtagggcataattggagtcttcaggcgtgtcaaacttgcatatcgagcggtggtcagcagccataggtatctgcttctcttcacggtacccgagaacggccgattcgggatcgacgatgagtgagctgaacagtttcatattctgcgtttcgtagaatgaccagagctcaaggccggccgaaaaatgccgaaattcgtcattgatcacttggatcgccccagagttcggttccagatcgccaacataagcgcggtcgtacgcaatcttaaggaggtaccttagcgtctttgccgagtcggcacctcgatgcggcgtggcaaggaaatataatgcggtaaatcgttcagacagtgccttgtgcactttgtcttgtttcgccaggatatatgcttttttcatcaccaagccacccatgctgtggccgatgacaatgatgtatgtcgcagaattcataatgcatggcgaagtgctgatcgcgcttaggaatgtcttgccaatgtggtgtacattcaagcagtcctccctacccttcaaatagtatgagtcgtatccatagctatggatgcgggcgttctggaatgcaggatctttggagagccactcctttggccaaaaatgagattgcagggatgacttgctccatgtctttctagaacttccccctaggccatggacgaagatgacatcaatctccggtaccgtgggagaatacaagaggtttagtccaagcgggcccttcacgtcctccgcctgatcaaccaagatggctgacgtccgggacaggggctttgacagagaaaacaagctcctcgagctcttaattgaatcgcgactactcgaggaattatcggaatgtggatcgggctttgcgcggtgctgctttcgaaagaactggtacagtcagcgatcaagcagaattgaattttccagtaggctaaggagtcgagagtttaccattgtagcccacaaatttcagtgtgtggggcgccaatctcggttgcccgaaatcatctaaaatgacttcagcacgacagtctgtcaatcagaagaacaatggaacaatggaacaatggtacaatgaagtcgtttcaggaaagactgttgatgtccagtgcctcgggatcgaagcaggtagcaattaggcggccaattctccctcccgcttcaaatccttcaaaccaccaatcagctggttgctttaagcgctcctctatgaaccccgcaggctcggtaaaggccagcatgcatctcttctagaaaatcgcgcactccggaattctgtaaaacccccattgacatgcacctttcttgccattccttgatgatgctgtgttgatttggcccataagagagattctccgcgcattgtgttttagtcgaaagagcgatttagcatgggttcccaggcgaatccggccttcacagttggggaccatgaggctttcatggaattcgctctccttcaggctcaaaaatcaccgccggctgccaacaaattctgcgtcggagccatacttgtcgatgccgctaatggcaaggtcctatcgacggggttctcgcttgaatacccacgagactacaagggagacccaggcaccacgcacgcagagcagtgttgttttatcaagattgccgatgagcacaacctcccagaggaacgcatccatgaagtccttccggccaatacggcgttgtacacaacgatggagccatgcaacgagagactgagtggcaacatgacctgcgcgaccaggatcttgagactcaagagcgccataaagaatgtctacgtgggaatcaaagagccaggaacttttatcgcgcacaatgacggacaggagaggctggaggcaaacggcgttagggtcatgttccctgttgaacattggcgtgacaggatcaccagtgtctcaatgatggggcactgaagactgtgatcaggttagctgagataaaagagttgaggttgcggaaacacccggacggcccgtccgcccacacagctctagtttaatctggccctcttattgttacctagggacgaaattggcgtgaatatacatatttgttgctgcgaggctctgggctctttcttccctgcgattacccctccctgtgtagctcattcctcggacataaacgcccccgagtgtgctcatacatgaaaatacagcatgaaaatatgaccgaattagcgttataccctgatctaattgttgtttaagaccaaagtgtattattttcattgtcaagctggaagcgattgggaaagaattcggaagatcccagatatccttgctctaaattaagtgcgttggcgaattgctgcgtgcataggccaaaagacaaaattatcagcgctgttattcttatctaagattcttcaacatgactaactatcctagaagtgatctgtgctcggtaatcgtgtgagctggggcgataagaggcatcccactctgaactgacaaataagtttacctaatccaaagtgataaatatgtgtcaacaaaagaaggttaccacaattttactagtgcgcccgaggaatattcagcacccccctctgcctgatgatcctaaggctcccaacgaccttactaagctcatcccctagttatttattctgcactttctatagtatataaaaatcacactctcaagtactcaattggctatgcccgtactagtccgtactgtaacgaccacgttccggcagtatgcaacctcaagtatcctgcctcgcttgcgccgcgtagcatccccggggtctaccatggattcctcataccgttgctaaattgcaagaatcttctgaactatgtacatggttgatgatggcgcccatccttcttccgcgtgcagctatacaagagatatacatgacccagaaacacccaaaggcttcatctgaatggaaggggctcaacgagagtgatcaaaccaaagaaattcactgctgcactgaattaccaacaatgtccaaataatgtgcacatatattcacagcttgatggaatgaacataagcagcaacctcactgccgaaaatccggtctctcacaagctggtcggccgactcgacgatccaagtctggcagttcctctgagtgagcctgctccaccccctagtggaaccgctccccctcagagaacctgccccgcatcgtggaagtcatgacggtacaccgaattgaggctgctatgctggtactggtacagtaggtcccaaaaacttgtacgaccattaccctcttcgattggttccccaatcctaatgccaagcctcattgatctatatcccgaatagggacggaaaattgatattccggtatctgcgtcatcacctgctctacacaagtcggatagcacattcaactctcctgcctgcctcgcagtggtcgggagcaaacagccgggacattctcatttgtcagatacttttaccgtggtcactcgactttacaacttctttgctatcgctttgaattctggactttattgacggcgaccaccgttaaatgcatcccgcaaatgatatcacaacgacggtcgatgacggctctcattcacgggagagcattcctccatggggctcattgcccattgaacaatatctgattgtaggatacacgagacacagcctgtttattcgcgacttgtcattcgctaacaactcaacagagaaactggaatcattctgcgaccgacacacccaaccagcagcggcggcaactaattcaccagttcctcaatttcgatgagattcccgaagaatatgtttctttgaatgggttccccccgctaaagccaacgtcggaggagattgatattattcttcaaccctggcgatccgatagcgaccttcgtcggaaagcatactatatgtccaaagataacgtgcttgtttttcttcggacccactataacccagacgacaatgacagaatgaacgaatggggctgtggaaacgatctgttcgaggataacgcctggtgggcgtgtctcaatgatccgtatttattcaatttcggctcagattggcagcaggtgtacgaaatcatgcctgagttcgctggtcccgttgatcgcaggagacaatctgctgatccaaccaatttagaaggctcttcagcaacgtccgaaagaagtctgcacacaaagaagccgggaggtttccatgagtggacagagcatcaggtaaagaagactgaggagtcagccaatcctctacagaacgtcaccatagcggcatacattgttattgcggatcaggagtcttttcagactggactgttgcagttattttgtttggacgataatcgaaaaattgtctgggaggctcgggttgatcgaaagccagctgagatcatgagacgtattcgccactcgggtcctgcactagaactataattttctgaatacaaaaaaaacaggattgtgaagcacatggccacaagtagatatggtgcagtagagacctaatagataaataatcttgaggtctcgccatatcaagagagatagactaccaacgcaatctgtcagtacacatccataggtagcaatcatcactatgccagcgtcgcgtaacaatgatcgtgtaagctaaaatcaggtacattctgtgctcttgacagcttgtcatgcggcttctttagcctcggctgcaatgggaggatgaccagggcctttgaatagcacaccgatgatggaaatgtcatcagaaaccctatcgctgatctcatgaattttgcttgggtcaagagatgatatctgggaaagggtataggtctgcatggcgtgagtatatgcacttatggcactctgggccagagggttgccagggctagggtcgaaaatcgattcgggcatgacgggctagaacgattgtttcgttgcgtaatttcgttcactggggcacgtcttaagttgtcgtaacacaatcttgcttgggaatcagcccgatcaactgaccagcgatctagcgtgtataggcaagagaaaaaggcgtacaaaaatatgctgcggcgaaatcgttgtagaaggaagtagaacgcaactgccattgatgaaaatataaattgttggatgacaattcaccgaaggaagaggatgtcgtgctaacaggaaaagcagaggaaccagatggggtgcgaacccagattcacggtgaatcagacacccattacgcacgcaagtggctttgcttgcggacccgagggaaccaattgggaggatgtcgacggacagggagaacgggaagtggggtagtaatgtctttagtcgcgatgcggccggagaaagtagccgtccactggactcggtggattgcaccgcagctcatgtcagggcaaaggataaatttggatcatgcttcttggtttattccccccaatagttaacatcctgtgcatactcttcattggcttaccgaccggtctgcgaccacgcgtcagggatgcaacaaagatccccagccactattttcggtattttcaaataggatccacaaaagtgcacaatcacaattctacgtcttatcccacatgagatgctttgtttatgggccaagatttgcgagtctcttggagaaagtaccccactgaatgttcgacttctatgctcgggttgtgttactggatgatttgttccaacagctgcctctttgctgctattgcagtgctttaggggagacgtttctcattatgctgtctgtacagatagcgtcccgaggtacaagggtttcgttatactgagtttacatcaaaaagcgcaaggttttctattttgatttataatactcctgatctgatccagccttaccatctaactgcatttcgtatgggtggctctgatcgcatggaggagggttctctatggcccttgtgcacattgacggctggtgggtcgactgggattgtgcttgtggcttagacttgttcatgttgctgctatggtttgagagaggcccgtgtagaaggtacgatggctgggcatgagggctgttcatttggctaccatcattatagcccattcgccgcttgcttttaggatagtactgttgctgggaagcatgtcggagcctttgggaagcagattggagattttccctctgcttctgcttctgctcctcgtgttcagtggcggccctaatggaggatatatgagtatgagagtgacaagcatgggtggaagacttaaagaacggacttggatgtagctttaatgaggctatagccaccacctaaagcaaggccagtcttgatgacacccacattttcaaaggggaaggagtttcggtagaagcttaggggattattgaaaatgtggaaatttgaagaccggaaaccgagggctattcattattgtctagcactagaagctgtgtcgttcgagaaccagagttaggcccctacacggttcggatttattggcaggctttctgggaagatgagaggggtaggtaaatggggcgcggggtgcgaagcagtggtctagcgtgcattccaggtgccattgtgactaaacatgcgttcccctgatgaaacgccaacagatggaataacaggaaatcaggagaagcgaggactatcatatattcatagtaaaatgtcataacttaactgtaccgtgctcaagagcgggatggaatctgtccaagtgggtgccctccctggaagcggtgagggtgcagcaaaggttcgaagatcacggataccgtctgtcttcctcgtttgccggtccgacgttcttgaaaccccagagaccttacgagtctaatacagaagctattttgaagctgtcatttacgcttgtactggaatactgccaagaaaggggttcaggggtagaataaccgtaacgggtatagcgtatttcgccacaactgcctctttgtggctgctgcaatgcattaggggagctatttctcaatatgctgtctgttcagtgtccggggtataagggtttcattgtatatactgcattttacaccaaaaggcgcttggttctattacgggggccacttaggtatattttgacatcataggctaagctgaaatgtagcgcttgccattatttatctaagacactatcacgatattaccaactgcatcacacctgtctacgtccaatcaataccagggccgcatcaagtgcaaggcaaggctcaacgacgtgcggatgtaaaaatatccaataggaaagaaatacatccattaataaattaacaggaacagtgagagcttcaaagttggcgaggacgttcagaaccgcttgaccggactaagaggaattccgatgccatgcttgccacggcatttgtgctccaaggcttccagcaagcggtatatttcttgttccagctgacggccttggcctcgcggatccatagttgcacttctttcttagttagctgctcggtgaattcaccgccggtcaacagcctgtccactgattgttcgaatttgctgcaacaagcgagaatattctggcagttccaaagaacatacaaaataaaagcgtccaaaggaaaagttttgttttgtctgcagaataattagcggaagatgagcagtcagggaacttggagaagctccacattttctttcccgtttcctcactacacaaaagaaaaaaaccacgtcccagatggcaaccggaccaccaccagcgctcaccaactagcttgtgctcgtgaaaagacttccgagtcctctccgctattgctttagaaagggacgctgtgccacagatgatgtctgtggctttgaccttcgcagtctggccagggtgaccggcttctttttgtctgtgaagctcttcgacatacgccaaataaagcataatatccgcgagccgagatttgagataatgtgtctcttcgcccgcttgcatagcatctacgtatctccaaatcgcaaagcctttcgtgctggaggatacgaggggatacttcgccacgtcaagctgtggagaatgccaaaatccggtcaacttccatgatttggtgtgcttttccataaaataaggcatgtcaggtcgcaagatacgatcgcactttctttcaacttcgtccttcttttctggcgatagagtggataggagaggatcgcataagaagcggccattccatttatctttacctggcttggaaggtaccgttgtcttagtagggccaacacttgaatccacacgacctttgaccactgaacgtgctaagattctccccgacgaggaattttcgccgacattctctgcaatttcgtcgtaatgcggggcttgaatcccactctttcccttttcgagacgaggtctgaggtttctggagttgggagctgaatgtgattcaagtccgggaaaaagcttccgtttggtttgcaaaatttggcggttttcacattccgaagtcacttgacgactatcagtgtgttgctcctcattgggcagattatgccggtcacttctattgaaggtaggggagatagacaccggagtgaaggttattggatttgactcggtattcacggaattgttgtcaccaggtggagaattttcgatactgcaagaggtgtcctgcaaaaatctgggcatctcgtccaagacggactcaatttccgagtctccaaagtcttcgtcattggtggatgcagtctgggggtgatcattttcggtatcatcagaggcatcttcgaccgttggctgcaatttcgagaaggtgggtgtactctgatgtttgtcgacagctcgattctctgagtcaatgccgcttgttgtccttcctgccgatctctccacatatttactccttgaaactggcgtatctggagggtttgaagtgggcgtgggaaaagacagacctgcgcctgacctcagagatggtgaagatgttcccagggctgggcgattttcacccgaatggttgcctgtaacattttgttgtgcttcttcaacagccgatatctccatctcattaaaacccccttcttgcatgatgccagctgaaacattatgcggtgaagtttctggtgacctctcacctatccatacaaggcggccgctgacaggagttggagacgttgggaggctagccacgggactatcttcatcgatatccatgcccggggtccattggtcttcggaccctcccgtcaaacgtgatatgaatgatgcgctttctttcgtaggatcgcaggacctaggagtggagctgggtgaaggttcgggtgcgtttgaattgtcacattctcggagtgcccagtcaaattcattagagggacaaccatcgtgtggggtaacgggagacggtttggcatgtgggttgtgggctatttctgttttcgaagttagcctttgttcaaatgtctaaagcccaatctctgtagaattttggatattaccgtgtgggggtgaggctggttgactcaacatagcttccgcgttcgaaagtgtcggggttccaaaacggctaggatcaggcgttgaaacaaaggctgtcatgttgtggtctcgtacgttcatgtccatcgtagttaacgaagggtctagaaagagagcacagtaaacaacggcaattctcgtgcgtcagaaacatgaaagccttaccgatgcagactggctcaggcgatcgagcatgcgcgacattaccaaaggccgaagtacatgttgcaggcgactgcacttggcaataatccacgatatcatagtcgatgagacaatctgtgctcattcgggctcgctcgtagaggacggcgatctcatcgcgagaaagcgaagattggattttgcaacagtggcagagggagcgtaaaatctgcattgagattagatatcttgcgaccggtgggatatggaaatgacaaacctcatctgctgacagggacggtaggttatttagactgttctgttctgcatcaccagtattctgtaggcaacgtcagatatttagaaaacaacgtaaggaagaaacccacattcaaagtaaacctgatttggagcatttccgacgcaagtgccctctggtggggaaataaaggaaagttgtagtgatatggctgggccactggaagggtgcgtaggaaagggtatcgtagagagttggtcgggcgaagaagacctgatggagggaaatcgccctgctcactctctgctcaccctctgctcaccctctactcaccctccctgatcatgaggggtgttgaatttcgcaaacttcggcatctcgatgaacataacctgaaaagagggttggaatacgcgacaaacactgtgtcactcttaaaccgaatttaaaccgcaaattgtttggtcgtgttaggggcaacaagtgaggtagagagtggaaattcaacaacgtggttaacatggtaggcattatcagctggtctgatttagtcaatgctcagtgaatatcatgtgaacggaggatggaccaatgaagggccctaaaaaggcttacgtagactgagcactccgggcgtgggtggaaaatcctttttcctttgtactcacaatagggggcggaggatatggaaggctctggtaccacgtgaccgtgtcgaattttcgatacgatcacgtgaagtttctcccgttataggccggcacaatcctgagggggatgttgaccttgccgaattatttcatgctgttgtttgattgtttccatcaaaatggtggaacaggacagcagagccctatattcgcattcgattttctaatctctcctatagaagttgtaggtatctccctacaacgataacaagaatgtagatgtattaaatcattttacatccgcccgcaattcttcctcttccaccctttcccagccaggaataatgtcttctaaggtctctctgattggccgtggataataatggtgctgtaattcaataagccaagtaacttccagcgcgacaaaatcactcatacatacctcgtccttttctgccgggagccacttcttcttacttgactcgaagatgtatagttggccactttgccgatttcggacggctacaacaacgtctgactcacagtagatactgtactcggctgcctttttgaaaaggccttttctgcgcctgcgtaacttctgtgctctcgcacgaaggttctcatgtttggcggtgattttagaaattagttcggaacttggagccattggcatatatgagaatatttcggattcttttcagcagcttatccgcattcgtggttaatatatctttgctcacggtctcagtgagggtccgccggatcctacaaggaagcagcatttgctgtgctgcgcggcccatccacagcgaccaagtatcgagcccttcaatggtgtattttgagtatacttattctcagcgagccattttaaggtcggttcgtaactgatacgtccgccataagaaggatataacagctcgggtttcgcttttattttgattcgcaacatggatatcttgactatctatgcgatcgccgttggcggcatcttcacaagtcttattatcattagagtcttgaatgtctttgcgccctggggcaacgcgatgaatgttttcatttaccagcatcttgcatatccgtatgttcttcgccgccattcacgtctggggccttggacacgagccggtgtttctcttcatttgatctacctcgcagtcaatttgctgctcctgtttttcaaccatatatccatggcagccactggtcgtcgagcaggaacgctgtcgctgctcaatatgatattccttctggcttcatggcatctgagcaacttggctgatattttcgggatttctctgagaatttaccgacggatgcatcgtgctgcaggttggatggtggtagctttggtattgtttcacgtttttgccatgctacagggcaaaattcaagaggatcaggggatgaacactgggcgcctttctgcaataattgtttgtaaaatgaatcagtcattacctggatctgatctaacaacatattgatatttagggcgctgggtctctatgctcgcttgtcattttatccctgcctttctgtcgaaagttttcatacgagttgtttcttcgactccatcaggcactcgttgttgcaagtgtttatgggatttggcggcatcttcccggtgaaacgtattccccccggttctatctctatgttgcattgggaatattgggctgtacgtccctctcccacttgatactccttctttataggaatggtctcttttctggcaacggatgcccgagagctattgcgatctgccatacgaatgaacgcgacgcagaaaatgcaggccaacacgtgaggacaacgccaattcgagtccgcctcattctgccaaggccagtcaaagcaatggccgggcaatacatcaacctgtggctgccttcgctgagtttatggtcctgggcacagacgcacccatttatgatcacgtcatggtctcgggcagaccagggtgtgttggatctcttggtagagccccgtggagggctcaccaaagctcttgtccgccaggcgcacgcagcagcaaaggacaacttctcttctttggccctttatagcggcccccacgggatcagcgagtctgtggataaatacgagagcgtcctgttggtagcaagtggggcaggtattgccgctatcattccttatgcaaagaaattgatccacggttataacacgtgcacatcgcatgtccgcagggtgcacttgatatggcaggtagaatcgcttggttggtttttttgctcttgatgaacaaaaggggataggctgactagatagatgttgctatatccatgcaaggcctcctgaacggtttgttaaaagacgatgtgctagatgatggctacgttcgtttgaaggtgttgtttcatgaccattagctgacgaagccttagatacttgccatatctgtctacgttgggcgagggcctctcacacatggaaaactgccctttggcaagcacgaacgagcttttctataccagggcgctccggactattcaatcatcattcctacggaggtttccggtgaaaaaatcgaaagactccccaatatccgagacgagagaggccaaatgctattgatcggtaggattctacgagcacgatagattgccaaacgctgacatggtaatgtttatagcttccacctcgggacatttgcgagatactctgcgacatattgtccaaggatatttacaccaacgcctgcaaatgatagaactcgagtatcagctataactctgaggctctggttgataatattgcggggcaggtgggcctatcatctgagggctcagggtgttgtgtagttccttgcgtgcgttggaattagaacgtcaatagcagatgtggttttgcgagattaggcttaggtgatggggatctacaatagacatgcaatttggacgaatcagggtgtggaggctgcgacactatttggggaagcggcactgtttaggtgccgcacccgcactctgtagtttaggccacgatttgtcgctgagaccacgatttttggcccaggccacgattcggtgtcgcggccacattttggtgctcagttctgctcagtccgatgatgtcatttctttgggcaattcatcttgcccttctatatctcagcgtttctgaacgattctgctcagggaacgtgactgatcattttccacactatttcagccttcttgattcccgttctccgctcgttgtctcgcccattcttggaatcccaaagctctctccctaagtgcttctgcaccgtccattctttattcttattgacgacattatttatttggccctggtttttttccttcatacgaacccgactttcatttttattgttaccgaatactgcctacgctagaccagaggtacgaatttctgagattgtatgctgaaattcaccagacctgaactctcaagtatttagaagtgcaagtcaaggtaaacaagccttttcttctttttcaagaacacctatcacattgccagtgtgagctaataatgaaattgcaagatggccgaatctaccggtctcatggacgatacgattgactggatcaatcataaaacccacacgccaaatcctgtatcagatcagctttccggaccacaatgcgatcatcttgatttcacatccaacctgaacattccgcccattccgcaaggctttgacagctaccccactactgggaatgtcatcaactatgctttcattaccaacagcaagatcagaaacacggtcatgaataaagttgtctgcattagcgttacgatgagagatcctcgaattacaaatactatgatcctcaattgtgtggatacaaaccgcattcccactttcacaacgcttgataacgctgatattgacgccgcttttgtatttaactctatcatcgtcacctctaatatcgacaattgcgacgttgctgaatcaacccttggcaatgctaggctcattaatcccgtcttctgcccgtttctgtttccagagctaccgctttcagtccaggacaattcgaccaacgccggggtccagattgattataatataacacctgatacgacttttaacacacccggcattacatctcaaaaccaagaaataccgaatacttcagctcaaggcatgcaaggggctctccgaaatgacacagacgtggctcctcaattatcattgaacctgctccaagaggctcgggcttccttccagaattccataccggagattggcagccacggggaacacaacagtgaagatcaagtggaaacctcgaccgaaaatgtctcgatcctaccaaatgtatcatcacctatcgggatttatgcgacccccatttctgattgcagcacaccctatgacaaagttgctgcgccatcttataagccaaaaaaacgaacacgaaaacaattagtttcgaaaggaaagagaaagagacgaacagaaccaaagccgcgtgtggggaatacaaataacaacattcttgctcttctcaaaaattgcgtttgtgggagcaaaagcaaagaactcaacaacaaacaagcacgggaggttcagacagttgcggattacatgattgtgaatgattgccacgcattattacagcctcaacttaagaaatggcagaagaatttgtccagtgataagcacgccctcggattcccgcctttggaaaagagtgcgacagctgcggcgaaatacttcgaactactccagtctgagagacttcttaagtatagcctggaacaccgcatggcgctcatttctttttacttgatttatcttgaaatcgcccgtgaaatgagggataatgaagacctcggtgactacgagcctcgatctggagacgacagatttacaacaatggccaacgacaagatcctagcgaccatccacgggattaaagtacagaccatcagcaaggaagaaattgatcgtggtagagcaaggctgaacgagtttcatcgctggggcaaacgatggtggacgcttgcg
